(19) United States
(12) Patent Application Publication
(10) Pub. No.: US 2024/0110203 A1
(43) Pub. Date: Apr. 4, 2024

(54) DNA NUCLEASE GUIDED TRANSPOSASE COMPOSITIONS AND METHODS OF USE THEREOF

(71) Applicants: The Broad Institute, Inc., Cambridge, MA (US); Massachusetts Institute of Technology, Cambridge, MA (US)

(72) Inventors: Feng Zhang, Cambridge, MA (US); Jonathan Strecker, Cambridge, MA (US); Guilhem Faure, Cambridge, MA (US)

(21) Appl. No.: 18/270,854

(22) PCT Filed: Jan. 7, 2022
(86) PCT No.: PCT/US2022/011710

§ 371 Date: Jul. 4, 2023

Related U.S. Application Data
(60) Provisional application No. 63/134,857, filed on Jan. 7, 2021.

(51) Int. Cl. C12N 15/90; C07K 14/47; C12N 9/22; C12N 15/11

(52) U.S. Cl. CPC C12N 15/907; C07K 14/47; C12N 9/22; C12N 15/11; C12N 2310/20; C12N 2800/90

(57) ABSTRACT

The present application provides systems, methods and compositions used for targeted gene modification, targeted insertion, perturbation of gene transcripts, nucleic acid editing. Novel nucleic acid targeting systems comprise components of Clustered Regularly Interspaced Short Palindromic Repeats (CRISPR) systems and transposable elements. Specifically, the disclosure provides an engineered composition comprising: a programmable DNA-binding protein and two or more Tn7-like transposition proteins, wherein at least one of the Tn7-like transposition proteins is connected to the DNA-binding protein or otherwise capable of forming a complex with the DNA-binding protein, wherein the DNA-binding protein comprising a Cas protein including a Cas12k protein, and wherein two or more Tn7-like transposition proteins consisting of TnsB, TnsC, and TniQ.

### CROSS-REFERENCE TO RELATED APPLICATIONS

[0001] This application claims priority to and the benefit of U.S. Provisional Application No. 63/134,857, filed on Jan. 7, 2021. The entire contents of the above-identified application is hereby fully incorporated herein by reference.

### STATEMENT AS TO FEDERALLY SPONSORED RESEARCH

[0002] This invention was made with government support under Grant Nos. HL141201 and HG09761 awarded by The National Institutes of Health. The government has certain rights in the rights in the invention.

### SEQUENCE LISTING

[0003] This application contains a sequence listing filed in electronic form as an ASCII.txt file entitled BROD-5330WP_ST25.txt, created on Jan. 7, 2022 and having a size of 789,487 bytes (791 KB on disk). The content of the sequence listing is incorporated herein in its entirety.

### TECHNICAL FIELD

[0004] The present invention generally relates to systems, methods and compositions used for targeted gene modification, targeted insertion, perturbation of gene transcripts, and nucleic acid editing. Novel nucleic acid targeting systems comprise components of Clustered Regularly Interspaced Short Palindromic Repeats (CRISPR) systems and transposable elements.

### BACKGROUND

[0005] Recent advances in genome sequencing techniques and analysis methods have significantly accelerated the ability to catalog and map genetic factors associated with a diverse range of biological functions and diseases. Precise genome targeting technologies are needed to enable systematic reverse engineering of causal genetic variations by allowing selective perturbation of individual genetic elements, as well as to advance synthetic biology, biotechnological, and medical applications. Although genome-editing techniques such as designer zinc fingers, transcription activator-like effectors (TALEs), or homing meganucleases are available for producing targeted genome perturbations, there remains a need for new genome engineering technologies that employ novel strategies and molecular mechanisms and are affordable, easy to set up, scalable, and amenable to targeting multiple positions within the eukaryotic genome. This would provide a major resource for new applications in genome engineering and biotechnology.

[0006] The CRISPR-Cas systems of bacterial and archaeal adaptive immunity show extreme diversity of protein composition, genomic loci architecture, and system function, and systems comprising CRISPR-like components are widespread and continue to be discovered. Novel Class 1 multi-subunit effector complexes and Class 2 single-subunit effector modules may be developed as powerful genome engineering tools. These are exemplified by bacterial and archaeal genomes comprising Tn7-like transposons associated with Class 1 and Class 2 CRISPR-Cas systems and CRISPR arrays.

[0007] Citation or identification of any document in this application is not an admission that such document is available as prior art to the present invention.

### SUMMARY

[0008] In an aspect, the present disclosure provides an engineered composition comprising: a programmable DNA-binding protein and two or more Tn7-like transposition proteins, wherein at least one of the Tn7-like transposition proteins is connected to the DNA-binding protein or otherwise capable of forming a complex with the DNA-binding protein.

[0009] In one example embodiment, at least one of the Tn7-like transposition proteins is connected to an N-terminus or C-terminus of the DNA binding protein. In one example embodiment, the two or more Tn7-like transposition proteins are derived from CRISPR-associated Tn7-like transposition proteins. In one example embodiment, the CRISPR-associated Tn7-like transpositions comprises at least a Cas-12k associated transposase. In one example embodiment, the two or more Tn7-like transposition proteins consist of TnsB, TnsC, and TniQ, wherein TniQ is connected to the DNA-binding polypeptide. In one example embodiment, the two or more Tn7-like transposition proteins consist of TnsC and TnsB, wherein TnsC is connected to the DNA-binding polypeptide. In one example embodiment, the TnsB, TnsC, and TniQ are proteins or proteins encoded by polynucleotides in Tables 1-6.

[0010] In one example embodiment, the programmable DNA-binding protein is a catalytically inactive transcription activator-like effector, Zinc Finger protein, meganuclease, IscB protein, a Cas protein, or a complex of Cas proteins. In one example embodiment, the DNA-binding protein is a Cas protein, other than a Cas12k protein, and the composition further comprises a guide molecule capable of forming a complex with the Cas protein and directing site specific binding of the complex to a target sequence in a target polypeptide. In one example embodiment, the Cas protein is a Type II or Type V Cas protein, or a complex of a Cas proteins complex.

[0011] In one example embodiment, the Cas protein is a catalytically inactive Cas9 (dCas9) or a nickase. In one example embodiment, the dCas9 is fused to one, two, or three or more TniQ, optionally at the N-terminus of the dCas9. In one example embodiment, the Cas protein is catalytically inactive Cas12 (dCas12). In one example embodiment, the dCas12 is a dCas12b or a dCas12a, optionally Bacillus hisahii Cas12b. In one example embodiment, the Tn7-like transposition proteins consist of TnsC or TniQ.

[0012] In one example embodiment, the composition further comprises a donor polynucleotide comprising a donor sequence for insertion into a target polynucleotide. In one example embodiment, the DNA-binding protein is a Cas protein, and the donor sequence is to be inserted at a position 3′ or 5′ of a PAM sequence of the Cas protein in the target polynucleotide. In one example embodiment, the donor sequence is flanked by a right end sequence element and a left end sequence element. In one example embodiment, the donor sequence: introduces one or more mutations to the target polynucleotide, introduces or corrects a premature stop codon in the target polynucleotide, disrupts a splicing site, restores or introduces a splicing site, inserts a gene or gene fragment at one or both alleles of a target polynucleotide, or a combination thereof.

[0013] In one example embodiment, the one or more mutations introduced by the donor sequence comprises substitutions, deletions, insertions, or a combination thereof. In one example embodiment, the one or more mutations causes a shift in an open reading frame on the target polynucleotide. In one example embodiment, the donor sequence is up to 30 kb in length. In one example embodiment, the donor polynucleotide is linear.

[0014] In another aspect, the present disclosure provides an engineered composition comprising one or more polynucleotides encoding components of the composition herein. In one example embodiment, one or more polynucleotides is operably linked to one or more regulatory sequences.

[0015] In another aspect, the present disclosure provides a vector system comprising one or more vectors encoding one or more polynucleotides encoding components of the composition herein. In one example embodiment, the vector comprises a first vector encoding the DNA-binding protein connected to the Tn7-like transposition protein, a second vector encoding the remaining Tn7-like transposition protein(s), and a third vector encoding the donor polynucleotide.

[0016] In another aspect, the present disclosure provides a cell or progeny thereof comprising the vector herein.

[0017] In another aspect, the present disclosure provides a cell comprising the composition herein, or a progeny thereof comprising one or more insertions made by the composition. In one example embodiment, the cell is a prokaryotic cell. In one example embodiment, the cell is a eukaryotic cell. In one example embodiment, the cell is a mammalian cell, a cell of a non-human primate, or a human cell. In one example embodiment, the cell is a plant cell.

[0018] In another aspect, the present disclosure provides an organism or a population thereof comprising the cell herein.

[0019] In another aspect, the present disclosure provides a method of inserting a donor sequence into a target polynucleotide in a cell, which comprises introducing into the cell the composition herein, wherein the DNA-binding protein directs the one or more Tn7-like transposition proteins to the target sequence and the one or more Tn7-like transposition proteins inserts the donor sequence into the target polynucleotide. In one example embodiment, the DNA-binding protein is a Cas protein, and the donor sequence is inserted at a position 3′ or 5′ of a PAM sequence of the Cas protein in the target polynucleotide. In one example embodiment, the donor polynucleotide: introduces one or more mutations to the target polynucleotide, corrects or introduces a premature stop codon in the target polynucleotide, disrupts a splicing site, restores or introduces a splicing site, inserts a gene or gene fragment at one or both alleles of a target polynucleotide, or a combination thereof.

[0020] In one example embodiment, the one or more mutations introduced by the donor sequence comprises substitutions, deletions, insertions, or a combination thereof. In one example embodiment, the one or more mutations causes a shift in an open reading frame on the target polynucleotide. In one example embodiment, the donor sequence is at least 30 kb in length. In one example embodiment, the cell is a prokaryotic cell. In one example embodiment, the cell is a eukaryotic cell. In one example embodiment, the cell is a mammalian cell, a cell of a non-human primate, or a human cell. In one example embodiment, the cell is a plant cell.

[0021] These and other aspects, objects, features, and advantages of the example embodiments will become apparent to those having ordinary skill in the art upon consideration of the following detailed description of illustrated example embodiments.

### BRIEF DESCRIPTION OF THE DRAWINGS

[0022] An understanding of the features and advantages of the present invention will be obtained by reference to the following detailed description that sets forth illustrative embodiments, in which the principles of the invention may be utilized, and the accompanying drawings of which:

[0023] FIG. 1A-1C show an exemplary CAST composition comprising dCas9 connected with transposition proteins.

[0024] FIG. 2A-2D show the fusion of dCas9 with TniQ and its activity of inserting a donor polynucleotide to a target site.

[0025] FIG. 3A-3D show the fusion of dCas9 with TnsC and its activity of inserting a donor polynucleotide to a target site.

[0026] FIGS. 4A-4D. FIG. 4A shows a schematic of a 134 bp double-strand DNA substrate (SEQ ID NO: 1) for in vitro transposases reactions. The transposase TnpA from Helicobacter pylori IS608 inserts single-stranded DNA 5′ to TTAC sites. FIG. 4B shows a schematic of constructs for expression in mammalian cells. TnpA from IS608 functions as a dimer and constructs were made fusing a monomer of TnpA to Cas9-D10A (TnpA-Cas9), a tandem dimer of TnpA connected to Cas9-D10A (TnpAx2-Cas9), or free TnpA alone. XTEN₁₆ and XTEN₃₂ are protein linkers of 16 and 32 amino acids respectively. FIG. 4C shows insertion of foreign DNA with mammalian cell lysates containing TnpA. In vitro reactions with the 134 bp substrate in panel a, synthesized sgRNA, and lysates from mammalian cells expressing the indicated constructs. The provided donor included in all reactions is a 200 bp circular ssDNA molecule containing the left and right hairpins of IS608 and 90 bp foreign internal DNA. PCR E1 amplifies the complete substrate, while the insertion-specific PCRs, E2 and E3, contain one flanking primer and one primer specific to the donor sequence. The observed products are consistent with donor insertion and match the predicted sizes of 183 bp (E2), and 170 bp (E3). The inability to detect a 334 bp band in the total reaction, or in PCR E1 suggests that the overall rate of insertion is low. PCRs E2 and E3 indicate donor insertion when TnpA is present in any lysate which is independent of sgRNA. FIG. 4D (SEQ ID NO: 1) shows TnpAₓ₂-Cas9 insertion site mapping and NGS sequencing of E2 products indicating the insertion site of donor DNA. Non-specific integration by TnpA occurs at all possible integration sites in the array indicated by peaks 4 bp apart. Incubation with TnpAₓ₂-Cas9-D10A lysate led to the targeted integration of single-strand DNA 5′ to positions 15 and 19 bp from the PAM in a manner that was dependent on presence and target site of guide RNA.

[0027] FIG. 5A-5D. FIG. 5A shows a schematic of a 280 bp double-strand DNA substrate for in vitro transposases reactions cloned into pUC19. The substrate contains two array of TTACx6 TnpA insertion sites, one which is targeted by Cas9 sgRNAs. Plasmid substrates were treated with T5 exonuclease to remove contaminating single-strand DNA. FIG. 5B shows insertion of foreign DNA with mammalian cell lysates containing TnpA. In vitro reactions with the 280 bp substrate in panel a, synthesized sgRNA, and lysates from mammalian cells expressing the indicated constructs. The donor DNA is a 160 bp circular ssDNA molecule containing the left and right hairpins of IS608 and 90 bp foreign DNA. PCR E1 amplifies the complete substrate, while the insertion-specific PCRs, E2 and E3, contain one flanking primer and one primer specific to the donor sequence. A 250 bp PCR product is detectable after incubation with TnpA_{Is608 x2}-Cas9_{D10A}, but not TnpA alone, and is dependent on the presence of donor and sgRNA. FIG. 5C shows purification of recombinant TnpA_{Is608 x2}-Cas9_{D10A} from E. coli which matches. Coomassie stained SDS-PAGE showing two dilutions of purified protein. FIG. 5D shows comparison of in vitro DNA insertions using mammalian cell lysates versus purified protein. In vitro reactions with the 280 bp substrate in panel a, synthesized sgRNA, and lysates from mammalian cells expressing the indicated constructs or purified protein from panel c. The donor DNA was a 160 bp circular ssDNA molecule containing the left and right hairpins of IS608 and 90 bp foreign DNA. PCR E1 amplified the complete substrate, while the insertion-specific PCRs, E2 and E3, contained one flanking primer and one primer specific to the donor sequence. E2 products of 250 bp were weakly visible upon addition of TnpA_{Is608 x2}-Cas9_{D10A} lysate and protein while PCR E3 detected more robust insertion products. The darker band at 152 bp was consistent with directed insertions to the Cas9-targeted TTAC array in contrast to the 240 bp band, predicted to be the size for non-targeted insertions at the second TTAC array. The 152 bp E3 insertion-specific PCR products were dependent on donor DNA and sgRNA.

[0028] FIG. 6 shows a schematic demonstrating an exemplary method. Cas9 was used to expose a single-stranded DNA substrate. A HUH transposase was tethered to insert single-stranded DNA. The opposing strand was nicked and allowed to fill-in DNA synthesis.

[0029] FIG. 7 shows a schematic of mammalian expression constructs with TnpA from Helicobacter pylori IS608 fused to D10A nickase Cas9. XTEN₁₆ and XTEN₃₂ are two different polypeptide linkers. Schematic of Substrate 1, a double-stranded DNA substrate(SEQ ID NO: 1) (complementary strand not shown) with an array of twelve TTAC insertion sites and targeted by two Cas9 sgRNAs.

[0030] FIG. 8 shows in vitro insertion reactions. Substrate 1 was incubated with the indicated mammalian cell lysates, a 200 bp circular single-stranded DNA donor, and sgRNAs. PCRs E2 and E3 detect insertion products by spanning the insertion junction with one donor-specific primer.

[0031] FIG. 9 shows TnpA,-Cas9 insertion site mapping and NGS of the insertion sites from the highlighted E2 reactions in FIG. 7 of the double-stranded DNA substrate (SEQ ID NO: 1). In the absence of guide, insertions were detected at all possible positions in the array. Addition of sgRNA1 or sgRNA2 in the reaction biased insertion events to two more prominent sites in the substrate.

[0032] FIG. 10 shows the prominent insertions sites of the DNA substrate (SEQ ID NO: 2) correspond to positions 16 and 20 from the PAM of the respective sgRNAs.

[0033] FIG. 11 shows a schematic and expression of new fusions of TnpA-Cas9 fusions from a variety of bacterial species. GGS₃₂ and XTEN₃₂ are polypeptide linkers. ISHp608 from Helicobacter pylori, ISCbtl from Clostridium botulinum, ISNsp2 from Nostoc sp., ISBce3 from Bacillus cereus, IS200G from Yersinia pestis, ISMma22 from Methanosarcina mazei, IS1004 from Vibrio chloerae. Experiments with Substrate 1 revealed insertion products with TnpA alone which may have resulted from single-stranded DNA contamination of the substrate. A second plasmid substrate (Substrate 2) was constructed with two arrays of six TTAC insertion sites. Single-stranded DNA was removed by T5 exonuclease digestion.

[0034] FIG. 12 shows in vitro insertion reactions. Substrate 2 was incubated with the indicated mammalian cell lysates, a 160 bp circular single-stranded DNA donor, and sgRNA1. PCR E2 detects insertion events which are predicted to be 247 bp in size.

[0035] FIG. 13 shows SDS-PAGE of TnpA-Cas9 purified protein (left, two dilutions shown). In vitro reactions with mammalian cell lysate and purified protein both reveal insertion events dependent on donor and sgRNA. +^{lin} donor denotes a linear donor.

[0036] FIG. 14 shows insertion site mapping and NGS of the insertion sites from the highlighted reactions in FIG. 12. Low levels of insertion were detected throughout the array (SEQ ID NO: 3) in the absence of guide. Addition of sgRNA2 resulted in targeted insertions within the guide sequence, most prominently at position 16 from the PAM.

[0037] FIG. 15 shows targeting of non-insertion sites and a plasmid substrate (Substrate 3; 201 bp substrate in pUC19) with insertions sites recognized by different TnpA orthologs. In vitro reactions with mammalian lysates, a 160 bp circular single-stranded DNA donor, and sgRNAs. TnpA from IS608 inserts after TTAC sequence and targeting other regions of the substrate does not result in detectable insertions.

[0038] FIG. 16 shows transposase fusions (TnsC and TniQ) to CRISPR effectors and E. coli targeting activities. E. coli targeting activities for TnsC fused to dAsCpf1 (left panel) and TniQ (3 tandem copies) fused to dCas9 (right panel) indicating the insertion reads based on the distance from the PAM site in bp. Below each panel shows the RNP complex +/−sgRNA.

[0039] FIG. 17 shows E. coli targeting activities of two different transposase-CRISPR effector fusions. Improved insertion activities are shown for a TniQ-Bh-Cas12b fusion (10×improvement in insertion frequency over Q-dCas9) and a TniQ fusion to Cas9 containing three tandem TniQ copies (5×improvement in insertion frequency over Q-dCas9) as described in FIG. 16.

[0040] The figures herein are for illustrative purposes only and are not necessarily drawn to scale.

### DETAILED DESCRIPTION OF THE EXAMPLE EMBODIMENTS

[0041] General Definitions

[0042] Unless defined otherwise, technical and scientific terms used herein have the same meaning as commonly understood by one of ordinary skill in the art to which this disclosure pertains. Definitions of common terms and techniques in molecular biology may be found in Molecular Cloning: A Laboratory Manual, 2^{nd} edition (1989) (Sambrook, Fritsch, and Maniatis); Molecular Cloning: A Laboratory Manual, 4^{th} edition (2012) (Green and Sambrook); Current Protocols in Molecular Biology (1987) (F. M. Ausubel et al. eds.); the series Methods in Enzymology (Academic Press, Inc.): PCR 2: A Practical Approach (1995) (M. J. MacPherson, B. D. Hames, and G. R. Taylor eds.): Antibodies, A Laboratory Manual (1988) (Harlow and Lane, eds.): Antibodies A Laboratory Manual, 2^{nd} edition 2013 (E. A. Greenfield ed.); Animal Cell Culture (1987) (R. I. Freshney, ed.); Benjamin Lewin, Genes I X, published by Jones and Bartlet, 2008 (ISBN 0763752223); Kendrew et al. (eds.), The Encyclopedia of Molecular Biology, published by Blackwell Science Ltd., 1994 (ISBN 0632021829); Robert A. Meyers (ed.), Molecular Biology and Biotechnology: a Comprehensive Desk Reference, published by VCH Publishers, Inc., 1995 (ISBN 9780471185710); Singleton et al., Dictionary of Microbiology and Molecular Biology 2^{nd} ed., J. Wiley & Sons (New York, N.Y. 1994), March, Advanced Organic Chemistry Reactions, Mechanisms and Structure 4^{th} ed., John Wiley & Sons (New York, N.Y. 1992); and Marten H. Hofker and Jan van Deursen, Transgenic Mouse Methods and Protocols, 2^{nd} edition (2011).

[0043] As used herein, the singular forms “a”, “an”, and “the” include both singular and plural referents unless the context clearly dictates otherwise.

[0044] The term “optional” or “optionally” means that the subsequent described event, circumstance or substituent may or may not occur, and that the description includes instances where the event or circumstance occurs and instances where it does not.

[0045] The recitation of numerical ranges by endpoints includes all numbers and fractions subsumed within the respective ranges, as well as the recited endpoints.

[0046] The term “about” in relation to a reference numerical value and its grammatical equivalents as used herein can include the numerical value itself and a range of values plus or minus 10% from that numerical value. For example, the amount “about 10” includes 10 and any amounts from 9 to 11. For example, the term “about” in relation to a reference numerical value can also include a range of values plus or minus 10%, 9%, 8%, 7%, 6%, 5%, 4%, 3%, 2%, or 1% from that value.

[0047] As used herein, a “biological sample” may contain whole cells and/or live cells and/or cell debris. The biological sample may contain (or be derived from) a “bodily fluid”. The present invention encompasses embodiments wherein the bodily fluid is selected from amniotic fluid, aqueous humour, vitreous humour, bile, blood serum, breast milk, cerebrospinal fluid, cerumen (earwax), chyle, chyme, endolymph, perilymph, exudates, feces, female ejaculate, gastric acid, gastric juice, lymph, mucus (including nasal drainage and phlegm), pericardial fluid, peritoneal fluid, pleural fluid, pus, rheum, saliva, sebum (skin oil), semen, sputum, synovial fluid, sweat, tears, urine, vaginal secretion, vomit and mixtures of one or more thereof. Biological samples include cell cultures, bodily fluids, cell cultures from bodily fluids. Bodily fluids may be obtained from a mammal organism, for example by puncture, or other collecting or sampling procedures.

[0048] The terms “subject,” “individual,” and “patient” are used interchangeably herein to refer to a vertebrate, preferably a mammal, more preferably a human. Mammals include, but are not limited to, murines, simians, humans, farm animals, sport animals, and pets. Tissues, cells and their progeny of a biological entity obtained in vivo or cultured in vitro are also encompassed.

[0049] The term “exemplary” is used herein to mean serving as an example, instance, or illustration. Any aspect or design described herein as “exemplary” is not necessarily to be construed as preferred or advantageous over other aspects or designs. Rather, use of the word exemplary is intended to present concepts in a concrete fashion.

[0050] A protein or nucleic acid derived from a species means that the protein or nucleic acid has a sequence identical to an endogenous protein or nucleic acid or a portion thereof in the species. The protein or nucleic acid derived from the species may be directly obtained from an organism of the species (e.g., by isolation), or may be produced, e.g., by recombination production or chemical synthesis.

[0051] As used herein, when a protein (e.g., an enzyme) is mentioned, the term also includes a functional domain of the protein (e.g., enzyme). For example, a reverse transcriptase may refer to a reverse transcriptase protein or a reverse transcriptase domain.

[0052] When a term refers to a protein, e.g., Cas protein, transposase, etc., the term encompasses both the full-length of the protein as well as a functional fragment of the protein. The term “functional fragment” means that the sequence of the polypeptide may include less amino-acid than the original sequence but still enough amino-acids to confer the enzymatic activity of the original sequence of reference. It is well known in the art that a polypeptide can be modified by substitution, insertion, deletion and/or addition of one or more amino-acids while retaining its enzymatic activity. For example, substitutions of one amino-acid at a given position by chemically equivalent amino-acids that do not affect the functional properties of a protein are common.

[0053] Various embodiments are described hereinafter. It should be noted that the specific embodiments are not intended as an exhaustive description or as a limitation to the broader aspects discussed herein. One aspect described in conjunction with a particular embodiment is not necessarily limited to that embodiment and can be practiced with any other embodiment(s). Reference throughout this specification to “one embodiment”, “an embodiment,” “an example embodiment,” means that a particular feature, structure or characteristic described in connection with the embodiment is included in at least one embodiment of the present invention. Thus, appearances of the phrases “in one embodiment,” “in an embodiment,” or “an example embodiment” in various places throughout this specification are not necessarily all referring to the same embodiment, but may. Furthermore, the particular features, structures or characteristics may be combined in any suitable manner, as would be apparent to a person skilled in the art from this disclosure, in one or more embodiments. Furthermore, while some embodiments described herein include some but not other features included in other embodiments, combinations of features of different embodiments are meant to be within the scope of the invention. For example, in the appended claims, any of the claimed embodiments can be used in any combination.

[0054] All publications, published patent documents, and patent applications cited herein are hereby incorporated by reference to the same extent as though each individual publication, published patent document, or patent application was specifically and individually indicated as being incorporated by reference.

[0055] The recitation of numerical ranges by endpoints includes all numbers and fractions subsumed within the respective ranges, as well as the recited endpoints.

### Overview

[0056] The present disclosure provides for engineered nucleic acid targeting compositions and methods for inserting a polynucleotide to a desired position in a target nucleic acid (e.g., the genome of a cell). In general, the compositions comprise transposition proteins, at least one of the transposition proteins is connected or fused to an N or C-terminus of a programmable DNA-binding protein. Such compositions may be smaller, require fewer components, and/or have higher efficiency in gene editing compared to known compositions comprising transposition proteins and DNA binding proteins.

[0057] In one example embodiment, the compositions comprise a catalytically inactive Cas protein and two or more Tn7-like transposition proteins, wherein at least one of the Tn7-like transposition proteins is connected or fused to the N- or C-terminal terminus of the catalytically inactive Cas protein. In such cases, the compositions may further comprise one or more guide molecules capable of complexing with the Cas protein and directing sequence specific binding of the guide-Cas protein complex to a target sequence of a target polynucleotide. The compositions may further comprise one or more donor polynucleotides. The donor polynucleotide may be inserted by the composition to a desired position in a target nucleic acid sequence. The present disclosure may further comprise polynucleotides encoding such nucleic acid targeting compositions, vector systems comprising one or more vectors comprising said polynucleotides, and one or more cells transformed with said vector systems.

### Systems and Compositions

[0058] In one aspect, the present disclosure includes compositions that comprise one or more transposition proteins and one or more programmable nucleotide-binding molecules (e.g., nucleotide-binding proteins). As used herein “programmable” refers to the ability of the protein to be configured to bind a specific polynucleotide sequence. In one example embodiment, the one or more transposition proteins (including sub-units thereof, functional fragments thereof), are linked to, bound to, or otherwise capable of forming a complex with the prograammable nucleotide-binding protein. In one example embodiment, the one or more transposition proteins and the nucleotide-binding protein are associated by co-regulation or expression. In another example embodiment, the one or more transposition proteins and nucleotide binding composition are associated by the ability of the nucleotide-binding domain to direct or recruit the one or more transposition proteins to an insertion site where the one or more transposition proteins direct insertion of a donor polynucleotide into a target polynucleotide sequence.

[0059] In one example embodiments, the one or more transposition proteins are to one or more nucleotide-binding proteins, or otherwise capable of forming a complex with the nucleotide-binding protein(s). In some example, the one or more transposition proteins is to one or more nucleotide-binding proteins at the N-terminus or C-terminus of the nucleotide-binding protein(s).

[0060] A programmable nucleotide-binding protein may be a DNA-binding protein. Alternatively or additionally, a nucleotide-binding protein may be an RNA-binding protein. In one example embodiment, the programmable nucleotide-binding component may be a CRISPR-Cas system, a transcription activator-like effector, a Zn-finger nuclease, a meganuclease, a functional fragment, a variant thereof, or any combination thereof. Accordingly, the composition may also be considered to comprise a nucleotide binding component and a transposition polypeptide. For ease of reference, further example embodiments will be discussed in the context of example Cas-associated transposition protein compositions.

[0061] The nucleotide-binding protein may be programmable. In some examples, the nucleotide-binding protein may be engineered to bind to a desired target polynucleotide. In some examples, the nucleotide-binding protein may form a complex or with a guide molecule or different protein which directs the binding of the nucleotide-binding protein to a desired polynucleotide.

### Transposons and Transposases

[0062] The compositions herein may comprise one or more components of a transposon and/or one or more transposition proteins. The term “transposon”, as used herein, refers to a polynucleotide (or nucleic acid segment), which may be recognized by a transposase or an integrase enzyme and which is a component of a functional nucleic acid-protein complex (e.g., a transpososome) capable of transposition.

[0063] A transposition protein may be a protein encoded by a gene in a transposon. A transposition protein may be a transposase or other protein involved in the function of the transposon. The term “transposase” as used herein refers to an enzyme, which is a component of a functional nucleic acid-protein complex capable of transposition and which mediates transposition. A transposase may comprise a single protein or be comprised of multiple proteins. For transposase comprising multiple proteins, the multiple proteins may complex form a multimeric active protein or may comprise a multimeric complex and separate protein e.g. a regulatory protein. Thus, in the context of multi-protein transposase systems, the term “transposition protein” may refer to any single protein of the multi-transposase system. A transposase may be an enzyme capable of forming a functional complex with a transposon end or donor polynucleotide recognition sequences. The term “transposase” may also refer in certain embodiments to integrases. The expression “transposition reaction” used herein refers to a reaction wherein a transposase inserts a donor polynucleotide sequence in or adjacent to an insertion site on a target polynucleotide. The insertion site may contain a sequence or secondary structure recognized by the transposase and/or an insertion motif sequence where the transposase cuts or creates staggered breaks in the target polynucleotide into which the donor polynucleotide sequence may be inserted. Exemplary components in a transposition reaction include a transposon, comprising the donor polynucleotide sequence to be inserted, and a transposition protein. The term “donor polynucleotide recognition sequence” as used herein refers to the nucleotide sequences at the distal ends of a transposon. The donor polynucleotide recognition sequences may be responsible for identifying the donor polynucleotide for transposition. The donor polynucleotide recognition sequences may be the DNA sequences the transpose enzyme uses in order to form transpososome complex and to perform a transposition reaction.

[0064] In one example embodiment, the disclosure provides compositions comprising a Tn7 or Tn7-like transposon system or components thereof. The transposon system may provide functions including but not limited to target recognition, target cleavage, and donor polynucleotide sequence insertion. In one example embodiment, the transposon system does not provide target polynucleotide recognition but provides target polynucleotide cleavage and insertion of a donor polynucleotide into the target polynucleotide.

Tn7 or Tn7-like Transposases

[0065] The one or more transposition proteins herein may comprise one or more Tn7 or Tn7-like transposition proteins. Tn7-like transposition proteins include Tn7 transposition proteins as well as homologs of Tn7 transposition proteins (e.g., proteins sharing at least 50%, at least 60%, at least 70%, at least 80%, at least 90%, at least 95%, or at least 99% sequence identity with a Tn7 transposition protein).

[0066] Transposons employ a variety of regulatory mechanisms to maintain transposition at a low frequency and sometimes coordinate transposition with various cell processes. Some prokaryotic transposons can also mobilize functions that benefit the host or otherwise help maintain the element. Certain transposons have evolved mechanisms of tight control over target site selection, the most notable example being the Tn7 family (see Peters J E (2014) Tn7. Microbiol Spectr 2:1-20). Three transposon-encoded proteins form the core transposition machinery of Tn7: a heteromeric transposase (TnsA and TnsB) and a regulator protein (TnsC). In addition to the core TnsABC transposition proteins, Tn7 elements encode dedicated target site-selection proteins, TnsD and TnsE. In conjunction with TnsABC, the sequence-specific DNA-binding protein TnsD directs transposition into a conserved site referred to as the “Tn7 attachment site,” attTn7. TnsD is a member of a large family of proteins that also includes TniQ, a protein found in other types of bacterial transposons. TniQ has been shown to target transposition into resolution sites of plasmids.

[0067] In some examples, the one or more transposition proteins are, or are derived from, Tn7-like transposition proteins. In a particular embodiment, the Tn7-like transposase may be a Tn5053 transposase. For example, the Tn5053 transposases include those described in Minakhina S et al., Tn5053 family transposons are res site hunters sensing plasmidal res sites occupied by cognate resolvases. Mol Microbiol. 1999 September;33(5):1059-68; and FIG. 4 and related texts in Partridge S R et al., Mobile Genetic Elements Associated with Antimicrobial Resistance, Clin Microbiol Rev. 2018 Aug. 1; 31(4), both of which are incorporated by reference herein in their entirety. In some cases, the one or more Tn5053 transposases may comprise one or more of TniA, TniB, and TniQ. TniA is also known as TnsB. TniB is also known as TnsC. TniQ is also known as TnsD.

[0068] In some examples, the system may comprise one or more CRISPR-associated Tn7 transposases or functional fragments thereof; one or more Type I-B (e.g. Type I-B1 or Type I-B2) Cas proteins. In some examples, the system may comprise one or more CRISPR-associated Tn7 transposases or functional fragments thereof; one or more Type V-K Cas proteins (e.g., Cas12k). In some examples, the system may comprise one or more CRISPR-associated Tn5 transposases or functional fragments thereof; one or more Type II Cas proteins (e.g., Cas9). Examples of CAST systems include those described in Strecker J et al., RNA-guided DNA insertion with CRISPR-associated transposases, Science. 2019 Jul. 5; 365(6448): 48-53; Klompe S E et al., Transposon-encoded CRISPR-Cas Systems Direct RNA-guided DNA Integration, Nature. 2019 July;571(7764):219-225; WO2019090173A1; WO2019090174A1; and WO2019090175A1, Saito, et al., 2021, Cell 184, 1-13; doi:10.1016/j.ce11.2021.03.06 which are incorporated herein by reference in their entireties.

[0069] Examples of Tn7 or Tn7-like transposases include TnsA, TnsB, TnsC, TniQ, TnsD, and TnsE. In some embodiments, the system comprises TnsA, TnsB, TnsC, TnsD and/or TniQ. Two or more of the components in the system may be comprised in a single protein (e.g., fusion protein). For example, TnsA and TnsB may be comprised in a single protein.

[0070] In certain examples, the transposition proteins comprise TnsB, TnsC, and TniQ. In some examples, the transposition proteins may comprise TnsB, TnsC, and TnsD. In such cases, the TniQ or TnsD may be fused to, attached to, linked to (e.g., via a linker), connected to, or associated with a programmable DNA-binding protein (e.g., a Cas or dCas such as dCas9). The terms fused to, tethered to, attached to, connected to, linked to and associated with are used interchangeably to indicate that the transposition protein(s) are stably tethered to (e.g., non-covalently linked) or covalently linked to the programmable DNA-binding protein (e.g., a Cas or dCas such as dCas9) to form a complex. In one example embodiment, the TniQ or TnsD may be fused to, tethered to, attached to, connected to, linked to (e.g., via a linker) or associated with the N-terminus of the DNA-binding protein (e.g., a Cas or dCas such as dCas9). In another example embodiment, the TniQ or TnsD may be fused to, tethered to, attached to, connected to, linked to or associated with the C-terminus of the DNA-binding protein (e.g., a Cas or dCas such as dCas9).

[0071] In certain examples, the one or more transposition proteins may comprise TnsB and TnsC, and do not comprise TnsD or TniQ. In one example embodiment, the TnsC may be fused to, tethered to, attached to, connected to, linked to (e.g., via a linker) or associated with a DNA-binding protein (e.g., a Cas or dCas such as dCas9). In another example embodiment, the TnsC may be fused to, tethered to, attached to, connected to, linked to (e.g., via a linker) or associated with the N-terminus of the DNA-binding protein (e.g., a Cas or dCas such as dCas9). In another example embodiment, the TnsC may be fused to, tethered to, attached to, connected to, linked to (e.g., via a linker) or associated with the C-terminus of DNA-binding protein (e.g., a Cas or dCas such as dCas9).

[0072] The dCas9 may be linked to one or more transposition proteins. In one example, the composition comprises dCas9, TnsB, TnsC, and TniQ, where dCas9 is associated with, fused, e.g., covalently linked to TniQ. In another example, the composition comprises dCas9, TnsB and TnsC, and does not comprise TniQ, where dCas9 is associated with TnsC. The dCas9 may be fused to the N-terminus or C-terminus of TniQ or TnsC.

[0073] Examples of transposases include those described in WO 2020/131862 and Strecker J. et al., Science 5 Jul. 2019: Vol. 365, Issue 6448, pp. 48-53, which are incorporated by reference herein in their entireties.

[0074] The catalytically inactive Cas protein fused to or linked to one or more transposition proteins may be further provided with one or more Tn7-like transposition proteins. In an example, the composition comprises dCas12 tethered at either the N-terminal or C-terminal end to TnsC, TnsD or TniQ and provided with a combination of TnsA, TnsB, TnsC, TniQ; or TnsA, TnsB, TnsC, TnsD; or TnsA, TnsB, TnsC, TniQ and TnsD; or TnsA, TnsB and TnsC; or TnsB, TnsC, TniQ; or TnsB and TniQ; or TnsB and TnsC.

[0075] In an example embodiment, the Type I-B29 system comprises a composition comprising a catalytically inactive Cas12b protein fused to or linked to one or more transposition proteins and provided with one or more Tn7-like transposition proteins. In an example, the composition comprises dCas12 tethered at either the N-terminal or C-terminal end to TnsC, TniQ, TnsD, or TnsDCore where TnsCore comprises TnsABC and provided with a combination of TnsA, TnsB, TnsC, TniQ; or TnsA, TnsB, TnsC, TnsD; or TnsA, TnsB, TnsC, TniQ and TnsD; or TnsA, TnsB and TnsC; or TnsB, TnsC, TniQ; or TnsB and TniQ; or TnsB and TnsC.

[0076] In an example embodiment, the Type I-B43 system comprises a composition comprising a catalytically inactive Cas12b protein fused to or linked to one or more transposition proteins and provided with one or more Tn7-like transposition proteins. In an example, the composition comprises dCas12 tethered at either the N-terminal or C-terminal end to TnsC, TniQ, TnsD, or TnsDCore where TnsCore comprises TnsABC and provided with a combination of TnsA, TnsB, TnsC, TniQ; or TnsA, TnsB, TnsC, TnsD; or TnsA, TnsB, TnsC, TniQ and TnsD; or TnsA, TnsB and TnsC; or TnsB, TnsC, TniQ; or TnsB and TniQ; or TnsB and TnsC.

[0077] In an example embodiment, the Type I-F system (e.g., Tn6677) comprises a composition comprising a catalytically inactive Cas12b protein fused to or linked to one or more transposition proteins and provided with one or more Tn7-like transposition proteins. In an example, the composition comprises dCas12 tethered at either the N-terminal or C-terminal end to TnsC or TniQ and provided in either the left end (LE) to right end (RE) direction or in the right end (RE) to left end (LE) direction with a combination of TnsA, TnsB, TnsC, TniQ; or TnsA, TnsB, TnsC, TnsD; or TnsA, TnsB, TnsC, TniQ and TnsD; or TnsA, TnsB and TnsC; or TnsB, TnsC, TniQ; or TnsB and TniQ; or TnsB and TnsC.

[0078] In an example embodiment, the Tn7 system comprises a composition comprising a catalytically inactive Cas12b protein fused to or linked to one or more transposition proteins and provided with one or more Tn7-like transposition proteins. In an example, the composition comprises dCas12 tethered at either the N-terminal or C-terminal end to TnsC or TnsD or TnsC/D and provided with a combination of TnsA, TnsB, TnsC, TniQ; or TnsA, TnsB, TnsC, TnsD; or TnsA, TnsB, TnsC, TniQ and TnsD; or TnsA, TnsB and TnsC; or TnsB, TnsC, TniQ; or TnsB and TniQ; or TnsB and TnsC.

[0079] In an example embodiment, the Type V-K system comprises a composition comprising a catalytically inactive Cas12b protein fused to or linked to one or more transposition proteins and provided with one or more Tn7-like transposition proteins. In an example, the composition comprises dCas12 tethered at either the N-terminal or C-terminal end to TnsC or TniQ and provided with a combination of TnsA, TnsB, TnsC, TniQ; or TnsA, TnsB, TnsC, TnsD; or TnsA, TnsB, TnsC, TniQ and TnsD; or TnsA, TnsB and TnsC; or TnsB, TnsC, TniQ; or TnsB and TniQ; or TnsB and TnsC.

[0080] In a certain example embodiment, the Type V-K system comprises a composition comprising a catalytically inactive Cas12b protein fused to or linked to one or more transposition proteins and provided with one or more Tn7-like transposition proteins. In an example, the composition comprises dCas12 tethered at either the N-terminal or C-terminal end to TniQ and provided with a combination of TnsB, TnsC and TniQ.

[0081] In a certain example embodiment, the Type V-K system comprises a composition comprising a catalytically inactive Cas12b protein fused to or linked to one or more transposition proteins and provided with one or more Tn7-like transposition proteins. In an example, the composition comprises dCas12 tethered at either the N-terminal or C-terminal end to TniQ and provided with a combination of TnsB and TnsC.

[0082] In an example embodiment, the Type V-K system comprises a composition comprising a catalytically inactive Cas9 protein fused to or linked to one or more transposition proteins and provided with one or more Tn7-like transposition proteins. In an example, the composition comprises dCas9 tethered at either the N-terminal or C-terminal end to TnsC or TniQ and provided either upstream or downstream with a combination of TnsA, TnsB, TnsC, TniQ; or TnsA, TnsB, TnsC, TnsD; or TnsA, TnsB, TnsC, TniQ and TnsD; or TnsA, TnsB and TnsC; or TnsB, TnsC, TniQ; or TnsB and TniQ; or TnsB and TnsC.

[0083] In an example embodiment, dCas9 is connected to, fused to TnsC and the dCas9-TnsC complex is successfully used to direct insertion of donor polynucleotide(s) into the E. coli chromosome. In one example embodiment, catalytically-inactive AsCpf1 (dAsCpf1) is connected to, fused to TnsC and the dAsCpf1-TnsC complex is successfully used to direct insertion of donor polynucleotide(s) into the E. coli chromosome at a similar frequency as that of the dCas9-TnsC complex. In one example embodiment, dCas9 is connected to, fused to three tandem copies of TniQ (3xTniQ) and the dCas9-3xTniQ complex is successfully used to direct insertions of donor polynucleotide(s) into the E. coli chromosome with an about 5-fold improved insertion frequency compared to the dCas9-TnsC complex. In one example embodiment, catalytically inactive Cas12b (dCas12b from e.g., Bacillus hishashii) is connected to, fused to TniQ and the dCas12b-TniQ complex is successfully used to direct insertions of donor polynucleotide(s) into the E. coli chromosome with an about 10-fold improved insertion frequency compared to the dCas9-TnsC complex.

[0084] In one example embodiment, the transposition protein(s) may be associated with the reprogrammable nucleotide-binding protein(s). In some examples, the transposition protein(s) and the reprogrammable nucleotide-binding protein(s) may be a single fusion protein. In one example, the single fusion protein comprises dCas, TniQ, and TnsB, and TnsC. In another example, the single fusion comprises dCas, TnsB and TnsC. In one example embodiment, the transposition protein(s) and the reprogrammable nucleotide-binding protein(s) may be separate molecules, e.g., delivered separately to cells and organisms.

### Example Components

[0085] Example TniQ proteins that may be used in example embodiments are provided in Table 1 below.

TABLE 1
Example TniQ proteins and species sources.
Table 1 - TniQ source species and sequence information

| Sequence Deposit | Species |
|---|---|
| PSN81037.1 | filamentous cyanobacterium CCP4 |
| PSN15844.1 | filamentous cyanobacterium CCT1 |
| KIF40774.1 | Lyngbya confervoides BDU141951 |
| KIF15850.1 | Aphanocapsa montana BDHKU210001 |
| 1007083209 | Microcoleus PCC 7113 PCC 7113 |
| AFZ13044.1 | Crinalium epipsammum PCC 9333 |
| PSB14771.1 | filamentous cyanobacterium CCP2 |
| ACK66982.1 | Cyanothece sp PCC 8801 |
| 1003731573 | Cyanothece PCC 7822 PCC 7822 |
| 1007036591 | Geitlerinema PCC 7407 PCC 7407 |
| AUB36897.1 | Nostoc flagelliforme CCNUN1 |
| ODH02152.1 | Nostoc sp KVJ20 |
| 1085057686 | Hassallia byssoidea VB512170 |
| BAY96427.1 | Tolypothrix tenuis PCC 7101 |
| BAZ73065.1 | Aulosira laxa NIES 50 |
| BAZ25526.1 | Scytonema sp NIES 4073 |
| 1014176179 | Anabaena wa102 WA102 |
| KIF41179.1 | Lyngbya confervoides BDU141951 |
| KIF16255.1 | Aphanocapsa montana BDHKU210001 |
| PZV06486.1 | Leptolyngbya sp |
| BAY01384.1 | Anabaena cylindrica PCC 7122 |
| AFZ56184.1 | Anabaena cylindrica PCC 7122 |
| WP 051424360.1 | Aphanizomenon flos aquae |
| PSB32846.1 | Chlorogloea sp CCALA 695 |
| BAY38503.1 | Nostoc sp NIES 2111 |
| ALF54858.1 | Nostoc piscinale CENA21 |
| WP_066425687.1.1 | Anabaena sp 4 3 |
| BBD58014 | Nostoc sp HK 01 |
| BAT55395.1 | Nostoc sp NIES 3756 |
| PHM10230.1 | Nostoc sp Peltigera malacea cyanobiont DB3992 |
| WP_088893314.1 | Leptolyngbya ohadii |
| AFZ00422.1 | Calothrix sp PCC 6303 |
| KYC40720.1 | Scytonema hofmanni PCC 7110 |
| ABA20964.1 | Trichormus variabilis ATCC 29413 |
| BAY20689.1 | Calothrix sp NIES 2100 |
| AUT01643.1 | Nostoc sp CENA543 |
| AFY45246.1 | Nostoc sp PCC 7107 |
| BAZ48747.1 | Nostoc sp NIES 4103 |
| WP_019497300.1 | Calothrix sp PCC 7103 |
| OKH59026.1 | Scytonema sp HK 05 |
| BAY48803.1 | Scytonema sp HK 05 |
| AFZ19202.1 | Microcoleus sp PCC 7113 |
| ACK66972.1 | Cyanothece sp PCC 8801 |
| BAY29315.1 | Nostoc carneum NIES 2107 |
| OYE02882.1 | Nostoc sp Peltigera membranacea cyanobiont 232 |
| ABA21808.1 | Trichormus variabilis ATCC 29413 |
| 1085030415 | Scytonema millei VB511283 |
| PHK24183.1 | Nostoc linckia z13 |
| PHJ86651.1 | Nostoc linckia z6 |
| PHK11295.1 | Nostoc linckia z9 |
| PHK05019.1 | Nostoc linckia z8 |
| PHJ98765.1 | Nostoc linckia z7 |
| PHJ86579.1 | Nostoc linckia z4 |
| PHJ72144.1 | Nostoc linckia z2 |
| PHJ65860.1 | Nostoc linckia z3 |
| PHK46993.1 | Nostoc linckia z16 |
| PHJ61579.1 | Nostoc linckia z1 |
| PHK35637.1 | Nostoc linckia z18 |
| PHK21752.1 | Nostoc linckia z14 |
| ABA20776.1 | Trichormus variabilis ATCC 29413 |
| BAY94950.1 | Fremyella diplosiphon NIES 3275 |
| 1030027413 | Tolypothrix PCC 7601 UTEX B 481 |
| BAY94946.1 | Fremyella diplosiphon NIES 3275 |
| BAY21176.1 | Calothrix sp NIES 2100 |
| AFZ58293.1 | Anabaena cylindrica PCC 7122 |
| BAY04727.1 | Anabaena cylindrica PCC 7122 |
| ALB43650.1 | Anabaena sp WA102 |
| PPJ64039.1 | Cuspidothrix issatschenkoi CHARLIE 1 |
| BAZ36950.1 | Calothrix sp NIES 4101 |
| 1007024179 | Rivularia PCC 7116 PCC 7116 |
| BAY83112.1 | Calothrix parasitica NIES 267 |
| PSB32839.1 | Chlorogloea sp CCALA 695 |
| BAQ63846.1 | Geminocystis sp NIES 3709 |
| 1015999696 | Geminocystis NIES 3708 NIES 3708 |
| PHV61492.1 | Cyanobacterium aponinum IPPAS B 1201 |
| AUC60981.1 | Cyanobacterium sp HL 69 |
| AUC60496.1 | Cyanobacterium sp HL 69 |
| ACK66248.1 | Cyanothece sp PCC 8801 |
| ACV01162.1 | Cyanothece sp PCC 8802 |
| EAZ90282.1 | Cyanothece sp CCY0110 |
| BAY57932.1 | Leptolyngbya boryana NIES 2135 |
| BAS62248.1 | Leptolyngbya boryana dg5 |
| BAS55900.1 | Leptolyngbya boryana IAM M 101 |
| PZO41970.1 | Pseudanabaena frigida |
| BAQ60389.1 | Geminocystis sp NIES 3708 tRNA-Val |
| PHV63798.1 | Cyanobacterium aponinum IPPAS B 1201 |
| AFZ43613.1 | Halothece sp PCC 7418 |
| 1002402539 | Cyanothece PCC 7424 PCC 7424 |
| 1033002085 | Gloeocapsa PCC 73106 PCC 73106 |
| WP_036484423.1 | Myxosarcina sp GI1 |
| 1033008262 | Xenococcus PCC 7305 PCC 7305 |
| 1003731291 | Cyanothece PCC 7822 PCC 7822 |
| 1103531115 | Phormidesmis priestleyi Ana |
| 1096456067 | Photobacterium swingsii CAIM 1393 |
| OUC12055.1 | Alkalinema sp CACIAM 70d |
| BAB75327.1 | Nostoc sp PCC 7120 |
| BAY69255.1 | Trichormus variabilis NIES 23 |
| ACC83974.1 | Nostoc punctiforme PCC 73102 |
| WP_029636334.1 | Scytonema hofmanni UTEX B 1581 |
| KIF35556.1 | Hassallia byssoidea VB512170 |
| OBQ23833.1 | Anabaena sp WA113 |
| PSB34853.1 | Chlorogloea sp CCALA 695 |
| AFZ20489.1 | Microcoleus sp PCC 7113 |
| AFZ13441.1 | Crinalium epipsammum PCC 9333 |
| WP_072619870.1 | Spirulina major |

[0086] Examples of transposition proteins and other components in the system may include components in Tables 2-6 below.

TABLE 2
Example Transposition Proteins

| | |
|---|---|
| Response | MSTIPIGSYKFSQKLHPLSLLAQLT |
| regulator | SRRATGCLRIFTGTVSWSIYLEDGK |
| | LTYASYSEKLFDRLDNHLQQLSQQI |
| | PALNSATAMQMRLMFEPKGENQPIS |
| | DADYQAICWLANQAHITSSQAGMLI |
| | ENLAKEVLELFLTLKEGSYEFSAEN |
| | SLNQLPKFCSLDLRLLVEHCQKQLR |
| | SQQNSQLPLPAPGKTQVEKATRLPQ |
| | SQMQLGQPLPHQSNFDSQDTNNNKM |
| | QGQTASKQLYRVACIDDSQTVLNSI |
| | KNFLDENTFSVVLINDPVKALMQIL |
| | RSKPDLILLDVEMPNLDGYELCSLL |
| | RRHSAFKNTPIIMVTGRTGFIDRAK |
| | AKMVRASGYLTKPFTQPELLKMVFK |
| | HIS |
| | (SEQ ID NO: 4) |
| Transposase | MNSQQNPDLAVHPLAIPMEGLLGES |
| (TnsB) | ATTLEKNVIATQLSEEAQVKLEVIQ |
| WP_084763316.1 | SLLEPCDRTTYGQKLREAAEKLNVS |
| | LRTVQRLVKNWEQDGLVGLTQTSRA |
| | DKGKHRIGEFWENFITKTYKEGNKG |
| | SKRMTPKQVALRVEAKARELKDSKP |
| | PNYKTVLRVLAPILEKQQKAKSIRS |
| | PGWRGTTLSVKTREGKDLSVDYSNH |
| | VWQCDHTRVDVLLVDQHGEILSRPW |
| | LTTVIDTYSRCIMGINLGFDAPSSG |
| | VVALALRHAILPKRYGSEYKLHCEW |
| | GTYGKPEHFYTDGGKDFRSNHLSQI |
| | GAQLGFVCHLRDRPSEGGVVERPFK |
| | TLNDQLFSTLPGYTGSNVQERPEDA |
| | EKDARLTLRELEQLLVRYIVDRYNQ |
| | SIDARMGDQTRFERWEAGLPTVPVP |
| | IPERDLDICLMKQSRRTVQRGGCLQ |
| | FQNLMYRGEYLAGYAGETVNLRFDP |
| | RDITTILVYRQENNQEVFLTRAHAQ |
| | GLETEQLALDEAEAASRRLRTAGKT |
| | ISNQSLLQEVVDRDALVATKKSRKE |
| | RQKLEQTVLRSAAVDESNRESLPSQ |
| | IVEPDEVESTETVHSQYEDIEVWDY |
| | EQLREEYGF |
| | (SEQ ID NO: 5) |
| Transposase | MTEAQAIAKQLGGVKPDDEWLQAEI |
| (TnsC) | ARLKGKSIVPLQQVKTLHDWLDGKR |
| WP_029636336.1 | KARKSCRVVGESRTGKTVACDAYRY |
| | RHKPQQEAGRPPTVPVVYIRPHQKC |
| | GPKDLFKKITEYLKYRVTKGTVSDF |
| | RDRTIEVLKGCGVEMLIIDEADRLK |
| | PETFADVRDIAEDLGIAVVLVGTDR |
| | LDAVIKRDEQVLERFRAHLRFGKLS |
| | GEDFKNTVEMWEQMVLKLPVSSNLK |
| | SKEMLRILTSATEGYIGRLDEILRE |
| | AAIRSLSRGLKKIDKAVLQEVAKEY |
| | K |
| | (SEQ ID NO: 6) |
| Transposase | MIEAPDVKPWLFLIKPYEGESLSHF |
| (TniQ) | LGRFRRANHLSASGLGTLAGIGAIV |
| WP_029636334.1 | ARWERFHFNPRPSQQELEALASVVE |
| | VDAQRLAQMLPPAGVGMQHEPIRLC |
| | GACYAESPCHRIEWQYKSVWKCDRH |
| | QLKILAKCPNCQAPFKMPALWEDGC |
| | CHRCRMPFAEMAKLQKV |
| | (SEQ ID NO: 7) |
| Hypothetical | MDYFSTGKIAYPKLTLYAFHLKHSL |
| protein | SQKPKIPVKNANDLWLKCQQLGKQL |
| | GIPKLETLPELIEKANNKKTSITGE |
| | ILPERFLKFTAIQHQPNLHLSGEAN |
| | PLEIHDTYALDLTLRYPYSEVKLAD |
| | LRGLNLDDCLLSKNIKASLGQTLVF |
| | FAQPVGKIHDEQAFADACVKALLSE |
| | EISQKLNIYCQHQGQLLGSPIFEYN |
| | NDADFPEKQCHLLIWLNTHDITTEL |
| | ENKGEYYYPLIDLLLCRSKIIYARS |
| | EAIWCYEQAKSAYSDLEKYKQEFKE |
| | QKNNSIDSKFNNLNQWLQEIPEISF |
| | NYVDYLKDLELHKTTIQTNSKNYRL |
| | YLEKLNKIGIGSDNLEFLSNFLELA |
| | EDTLVEQINTNLAYLTPGQNLFDQM |
| | IGTIRGIVELEQAKRDRSLERTIQV |
| | LGIAFGGGAIVSGVVTQHIDKPFAP |
| | QINFKYPVHPLVSSLLWSVLATAIF |
| | GIVAWWVTKPKPKRNKQK |
| | (SEQ ID NO: 8) |
| Hypothetical | MSDYEITVNTFIHLLNTQSYLFSAE |
| protein | DRITLMKLINNQPDDIKSLSDTISD |
| | WCAKHPEVDKALGEFEKIVVRGPGD |
| | KQANTNIPKYELDKKNILNEIQQSS |
| | SSAKETKKTTST |
| | (SEQ ID NO: 9) |
| tetratricopeptide | MLGERAENLEQAIACHQKAVKIYTL |
| repeat protein | DAFPYEWASTQNNLGAAYRDRILGE |
| | QAENLELVIACFQNALKIYTFEAFP |
| | DDWANTQDNLGTAYANRIKGEQAEN |
| | LELALAAYSAALEVRTRSNFPEDWA |
| | MTQNNLGGAYSYRILGNRAENIELA |
| | IAACSAALEVTTRSAFPEYWARTQY |
| | NLGIAYSQRILGEKTENIETAIAAY |
| | SAALEVTTRSAFPIDWARTQNNLGG |
| | AYSQRILGEKAENIETAIAAYSVAL |
| | EVYTRSAFPEYWAGTQYNLGIAYRQ |
| | RILGNRDENIELAIAAFSAALEVRT |
| | RSAFPEDWATTQNDLGIAYGERILG |
| | EKAENIELAIAAFSAALEVRTRSAF |
| | PVDWADKQNNLGIAYTYRILGEKAE |
| | NIELAIAAYSAALEVRTRSAFPENW |
| | ATTQNNLGGAYSQRILGEKAENIEL |
| | AIAAYSAALEVRTRSAFPEDWAITQ |
| | NNLGGAYTYRILGEKAENIETAIAA |
| | YSAALEVTTRSAFPEDWATTQNNLG |
| | IAYGERILGEKAENIELAIAAYSVA |
| | LEVTTRSAFPVDWASTQHNLGNAYL |
| | DRILGEKAENIESAIAAYSSALEVR |
| | TRSAFPEKWAGTQNSLGNAYLDRIL |
| | GEKAENIELAIAAFSAALEVYTRSA |
| | FPENWAMTQTNLGGAYRERIFGEKA |
| | ENIESAITAYTAALEVRTRNAFPQN |
| | HATTLLNLGRLYQDEKQLDSAYNTF |
| | LQAIETAETLRGGTVSGEEAKRKQA |
| | EEWNQLYQRMVAVCLELGKDTEAIE |
| | YIERSKTRNLVELILNRDLKTIFPP |
| | EVVTQLEQLRDEIATGQYQIQNGKA |
| | ENPRLLAQHLQELRQQRNELQNRYL |
| | PVGYGFKFESFQATLDERTAIIEWY |
| | ILNDKILAFIVTKTGELTVWQSQPE |
| | DIKALVNWGNQYLQNYDDQKDQWLN |
| | SLGEELKELASILHIDEILTQIPKH |
| | SYKLILIPHFFLHLFPLHALPINQN |
| | SENSSCLLDLFAGGVSYAPSCQLLQ |
| | QVQQRQRPDFQSLFAIQNPTEDLNY |
| | TNLEVESILSYFPSHQVLSKKQATK |
| | AALSQAATQLKQANYLHFSCHGSFN |
| | LNYPQNSFLLLADAYISPIPDDANP |
| | ERYLKVSDTEAIDLSKCLTLGNLFE |
| | QTFDFSQTRLVVLSACETGLIDFNN |
| | TSDEYIGLPSGFLYAGSSSVVSSLW |
| | TVNDLSTSFLMIKFIQILKNATDMS |
| | IPLGMNQAQRWLRDATKEELQEWVK |
| | KLALDSTKKGKIRRQINNMTGEQPF |
| | NSPFHWAAFTAVGK |
| | (SEQ ID NO: 10) |
| hypothetical | MTYLEKLSPWCIVRLKPNMQNQIVA |
| protein | RFRRRSDAEAHLQVLRRLIPGVSFT |
| | LIFNVGLEQQDLTAVNE |
| | (SEQ ID NO: 11) |
| hypothetical | MNPHPLKQREQDLMQLYSYCQLGMT |
| protein | PKQFYSKWQVNYEEMAQICDRSLST |
| | VRRWFARGKNYRRPMPVDLRHLALM |
| | NFLLEHFEDIPEEVLQKLCFPEKSE |
| | (SEQ ID NO: 12) |
| hypothetical | MLKPVSYKTDQHRAYQQALDDFGIT |
| protein | ELLAKLNNYSDVDFDSAWIQLQQQE |
| | IESLAAILISQLTYSLNGKLIAAYL |
| | NLIRHSNQDIVPSLINLKCPDASIE |
| | LPANFSDVAKTPRFLYGDRLRWLST |
| | ESNTDWGIVIGRFYSNACDRCCWSW |
| | CYLIWLSKNSPSAAWTSADIAWEED |
| | LEPISEETEL |
| | (SEQ ID NO: 13) |
| hypothetical | MGKVTVTLYMEEEDKEALQFLADAE |
| protein | ERSLSQMAVLIVKRAIKQAQNDGKI |
| | PPKS |
| | (SEQ ID NO: 14) |
| Hypothetical | MKIEIQGRDAVKATEELLAIEGLEG |
| protein | SYQTIEEVEREGTLATIATIVGIVS |
| | GTLTIAESIHKWKEKNQKSLHDPTG |
| | ARVEKVLIVTDDNRRLLLKDATVEQ |
| | IKEILENYK |
| | (SEQ ID NO: 15) |
| CHAT domain- | MKILHLYLKLVGDRYAQLRLFWDNP |
| containing | NNCQSRQLPLAEITGLIKKVETDYY |
| protein | TRLPEDYAKTGQALYNWLDGSDRIF |
| | QSAIDQHKREVIVLAIAATEKLAHL |
| | PWEILHDSTDFLVNRRPFPIIPIRW |
| | VKDDDSKQLTPEDQPANRALNVLFM |
| | ATSPLGIEPELDFEAEEAQVLSATK |
| | RQPLSLIVEESGCLKELGYLVDDYD |
| | KSYFDVIHLTGHTTFRDGEPRFITE |
| | TELGQAEYSSAEDIATELQFQLPKL |
| | IFLSGCNTGYSSDAGAVPSMAEALL |
| | KQGATAVIGWGQRVLDTDAIATAAA |
| | LYQELSAGKTLTEAIAIAYQVLLKN |
| | QARDWHLLRLYVAETLPGALVKRGR |
| | KPVPRASVAQEFLDPEKKLRVATRE |
| | TFVGRRRQLQNCLRVLKPYSEKIGI |
| | LIHGMGGLGKSTIAARLCDRLSESE |
| | KIIGWRQIDESSLVSKLADKLRNAE |
| | LRTALREGKEELKYRLRDVFAELNQ |
| | SGEKPFLLVFDDFEWNLEHRQGRYI |
| | LKTQVAEILKSLVWAIKENNADHRI |
| | IITCRYDFESDLDESFYKQPLESFR |
| | KSDLQKKLSRLKAFNSEEISLNLIE |
| | RAKILADGNPRVLEWLNDEVLLGED |
| | AETKLTQLKANPTEWQGRIIWEELY |
| | EQLDQDIEQILSRCLVFEIPVPMIA |
| | LSAVCESTSDYKKQLSRAIELGLIE |
| | VSSEAEESNRLYRVSRIIPHIIPNI |
| | RLPEAPEVYCLYQKAYEKLHQMWGD |
| | KNNRSEEKWQEIFRLKFANKDNPER |
| | FRQGFSQMLAVQDNSEADKAFESEL |
| | RKCTNELEADKLCEALENYLQQEQW |
| | KQADKETAWTFYQVMVKENYADWHE |
| | LLKNFPCETLQEINRLWLENSNNKF |
| | GISIQSKIYQSLTGKDNSWNKFCDL |
| | VGWRKRGKSQTYNEIVDELTDIKRV |
| | VNDTFADVHVPSLPALIYTRLGDGW |
| | TTSMGWTVGDERPGFGGFGFLVVAC |
| | GIENLFSLAESCKD |
| | (SEQ ID NO: 16) |
| restriction | MKIESFFVNFELLTDAPNAVAKLRE |
| endonuclease | IILQLAVRGKLVSQKPNDEPALSSL |
| subunit S | NRAKIENEFFQQTEIFARDELDSFC |
| | PNNRSLATIPHRWEWVSLVEVVDKG |
| | KNSIKRGPFGSSIRKEFFVPDGYKV |
| | YEQKNAIYDDFQLGYYFINEKKFQE |
| | LKDFELKPNDIIISCSGTIGRIAVA |
| | PESIRQGIINQALLKITLNTKLLSN |
| | NYFKILFPAFFMNTSVLTELKGTAI |
| | KNIVGVQALKQLLFPLPPIAEQKRI |
| | VEKCDRLLSICDEIEKRQQQRQESI |
| | LRMNESAIAQLLSSQNPDEFRQHWQ |
| | RIRNNFDLFYSVPETIPKLRQAILQ |
| | LAVQGKLVRQEFDESALRYLIERIT |
| | EERLALCPNEKDKQRILSEFGKIIE |
| | ESAQGKTEEFEIPAICICDFITKGT |
| | TPSNSELLPEGEIPYLKVYNIVDNK |
| | IDFFYKPTYISRTVHTTKLKRSLVC |
| | PGDVLMNIVGPPLGKIAIVPDDFPE |
| | WNINQALAVFRPVDSVYNRFMYYAL |
| | SSYATLEKVLNETKGTAGQDNLSLE |
| | QCRSLRIPLYTIETQKRIVEKCDRL |
| | MSLCDTLEAKLKQGRDSSEKLMEVA |
| | AKQVLTA |
| | (SEQ ID NO: 17) |
| SAM-dependent | MSISTTIKTIQDIMRKDAGVDGDAQ |
| DNA | RINQLVWMIFLKVFDAREEEYELLE |
| methyltransferase | DNYQSPIPEGLRWRNWAADSEGITG |
| | DGLLDFVDNALFKTLKELRTTATDA |
| | RGQMIGKVFEDAYNYMKNGTLIRQV |
| | INKLNEVDFNKKDQKKQFSEIYEKI |
| | LKDLQSAGNAGEYYTPRAVTKFIVD |
| | RIKPQLGEIVFDPACGTGGFLTAAI |
| | DYIRQNFQSADVPETLQRTIRGTEK |
| | KPLPFNLCVTNLILHGIDVPSAEHD |
| | NTLARPLRDYSPHERVDVIITNPPF |
| | GGMEEDGIEDNFPATFRTRETADLF |
| | LVLIAHLLKEGGRGAIVLPDGTLFG |
| | EGVKTRIKEKLLQDCNLHTIVRLPN |
| | GVFNPYTSIKTNLLFFTKGEPTERI |
| | WYYEHPYPAGYKSYSKTKPIRFEEF |
| | APEQEWWDNREKNEFAWQVSIADLK |
| | ANNYNIDIKNPHKVDVEHADLDEML |
| | AEHQKLMAELGEVRSKLKFELIEAL |
| | EIDED |
| | (SEQ ID NO: 18) |
| DEAD/DEAH | MPEAIDKKSLSERDICTKYITPALT |
| box helicase | NRAWDINTQIREEVTLTKGRVIVRG |
| | KLASRGEQKRADYVLYHKPGVPLAV |
| | IEAKDNNHGVSAGMQQAIATGELID |
| | VPFIFSSNGDAFMMCDRTITEGQRE |
| | REIPLEQFPTPQELWQKYCDWKGID |
| | SEIQPIVSQDYYPSSDKKQPRYYQQ |
| | IAINRTIEAIAKGENRILLVMATGT |
| | GKTFTAFQIIWRLWKSGAKKRILFL |
| | ADRNILVDQTRVNDFKPFGSRMTKI |
| | QKRQIDKSYETYLCLYQAVTGNEEA |
| | KNIYRQFSPDFFDLIIIDECHRGSA |
| | NEDSAWREILEYFRNATQIGLTATP |
| | RETEEASNINYFGESLFTYSLKQGI |
| | EDGFLAPYKVIRIDLDKDLSGWKPK |
| | PGQRDKYGKPIPDQVYNQRDFDRTL |
| | VLEKRTELVARIISDYLKSSDRFAK |
| | TIIFCETTDHAERMRVALVNENADL |
| | VAGNSRYIMRITGDDAQGKAELDNF |
| | IDPESKYPTIVTTSELLTTGVDAKT |
| | CKLIVLDQRILSMTKFKQIIGRGTR |
| | IDEDYGKMFFTIMDFKKATELFADP |
| | DFDGDPVQIYQPKPVDPIVPPDTGD |
| | DEVVIDDGEISRKQTRDRYVIADEE |
| | VSIAFIREQYYGKDGKLITESIKDY |
| | TRKTVSQEYASLDAFLKKWHSTEQK |
| | QAIIRELQELGVPLEALEKEIGRDF |
| | DPLDLICHVVFDQPPLTRKERANNV |
| | RKRNYFSNYGEQARTVLNALLDKYA |
| | DEGIEDIESLDVLKVQPISDLGTPL |
| | EIISIFGGKQAYLQALSVLKSEIYR |
| | VS |
| | (SEQ ID NO: 19) |
| MerR family | MEGKFYTSTEAAQITNCSRRQLQYW |
| transcriptional | RDKGVVVPTVNTTGKGRNVYYSISD |
| regulator | LLVLTVMHYLLSVGLSFEVSRQTLV |
| | ILRQKEPWLFEEFVPKEKMKRLMLL |
| | TTCSLEQPLTLAEFDKEAALEALCQ |
| | GQTVIPFWCDRIHQQLRDNLKSFSS |
| | (SEQ ID NO: 20) |
| Transposase | MLVFEAKLEGTKQQYEQLDEAIRTA |
| | RFIRNSCIRYWMDNPYIGRYELSAY |
| | CVVLQREFPFANKLNSMARQASAER |
| | AWSAIARFYDNCKKKAAKKGFPRFK |
| | KHQTHGSVEYKTCGWKLSEDRRTIT |
| | FTDGFKAGSFKMWGTRDLHFYQLKQ |
| | IKRVRAVRRADGYYVQFCLDVERVE |
| | KREPTGKTIGLDVGLAHFYTDSDGK |
| | TVENPRHLRKSEKALNRLGRRLSRT |
| | TKGSKNRAKSRNRLSRKHLKVSRQR |
| | KDFAVKLARCVIQSNDLVAYEDLQV |
| | RNMVKNRKLSKSISDAAWSAFRNWL |
| | EYFGKVFGVATVAVPPHYTSQNCSK |
| | CGEVIKKSLSQRTHKCHQCGLVLDT |
| | DWNAARNILELALRTVGHTGTLNAS |
| | GDISLCMSEEIPSSKLSRGKRKPKE |
| | (SEQ ID NO: 21) |

[0087] In one example embodiment, a TnsB protein may be the protein defined at Accession No. WP 084763316.1. In another embodiment, a TnsC protein may be the protein defined at Accession No. WP 029636336.1. In another embodiment, a TniQ protein may be the protein defined at Accession No. WP_029636334.1.

TABLE 3
Example TnsB Proteins

| Protein | Accession | DNA Sequence |
|---|---|---|
| ShTnsB | WP_ | atgaacagtcagcaaaatcctgatt |
| | 084763316.1 | tagctgttcatcccttggcaattcc |
| | | tatggaaggcttactaggagaaagt |
| | | gctacaactcttgagaagaatgtaa |
| | | ttgccacacaactctcagaggaagc |
| | | ccaagtaaagctagaggtaatccaa |
| | | agtttactggaaccctgcgatcgca |
| | | caacttatgggcaaaagttgcggga |
| | | agcagcagagaaactaaatgtatcg |
| | | ttgcgaacggtacaaaggttggtga |
| | | aaaactgggaacaagatggcttagt |
| | | cggactcactcaaacaagtagggct |
| | | gataaaggaaaacaccgcattggtg |
| | | agttttgggaaaacttcattaccaa |
| | | aacctacaaggagggtaacaaggga |
| | | agtaaacgtatgacccctaaacaag |
| | | ttgctctcagagtcgaggctaaagc |
| | | ccgtgaattaaaagactctaagccg |
| | | cccaattacaaaaccgtgttacggg |
| | | tattagcacccattttggaaaagca |
| | | acaaaaagccaagagtatccgcagt |
| | | cctggttggagaggaactacgcttt |
| | | cggttaaaacccgtgaaggaaaaga |
| | | tttatcggttgattacagtaaccat |
| | | gtttggcaatgtgaccatacccgcg |
| | | tggatgtgttgctggtagatcaaca |
| | | tggtgaaattttaagtcgtccctgg |
| | | ctaacaacagtaattgatacttact |
| | | ctcgttgcattatgggtatcaactt |
| | | gggctttgatgcacccagttctggg |
| | | gtagtagcattagcgttacgccatg |
| | | caattctaccaaagcgttacggttc |
| | | cgagtacaaactgcattgtgagtgg |
| | | ggaacctatggaaaaccagaacatt |
| | | tttatactgatggcggtaaagactt |
| | | tcgctctaaccacttgagtcagatt |
| | | ggggcgcaattgggatttgtctgtc |
| | | atttacgcgatcgcccttctgaagg |
| | | tggagtagtagaacgtcccttcaaa |
| | | acattaaatgaccaactattttcaa |
| | | cgcttcctgggtacaccggatctaa |
| | | tgtgcaggaacgcccagaagatgca |
| | | gagaaggacgcaagacttactttgc |
| | | gagaactagaacagttacttgtgcg |
| | | ttacatcgtagatcgttacaaccaa |
| | | agtattgatgcgcggatgggcgacc |
| | | aaacgcgctttgagcgttgggaagc |
| | | aggattgcctacagtgccagtacca |
| | | ataccagaacgagatttggatattt |
| | | gtttaatgaagcagtcacggcgcac |
| | | tgtgcaaagaggtggttgtttgcag |
| | | tttcagaatttaatgtatcgggggg |
| | | aatatttggcaggttatgccggaga |
| | | aactgtcaacttaaggtttgacccc |
| | | agagacattacaacaattttggttt |
| | | atcgccaggaaaacaatcaggaagt |
| | | atttctgactcgcgctcacgctcaa |
| | | ggtttggagacagagcaactggcat |
| | | tagatgaggctgaggcagcaagtcg |
| | | cagactccgtaccgcagggaaaact |
| | | atcagtaaccaatcattattgcaag |
| | | aagttgttgaccgcgatgctcttgt |
| | | cgctaccaagaaaagccgtaaggag |
| | | cgtcaaaaattggaacagactgttt |
| | | tgcgatctgctgctgttgatgaaag |
| | | taatagagaatccttgccttctcaa |
| | | atagttgaaccagatgaagtggaat |
| | | ctacagaaacggttcactctcaata |
| | | cgaagacattgaggtgtgggactat |
| | | gaacaacttcgtgaagaatatgggt |
| | | tttaa |
| | | (SEQ ID NO: 22) |
| ShTnsC | WP_ | Atgacagaagctcaggcgatcgcca |
| | 029636336.1 | agcagttgggtggggtaaaaccgga |
| | | tgatgagtggttacaagctgaaatt |
| | | gctcgtctcaagggtaagagcattg |
| | | tgcctttacagcaggtaaaaactct |
| | | ccatgattggttagatggcaagcgc |
| | | aaggcaagaaaatcttgccgagtag |
| | | ttggggaatcgagaactggcaagac |
| | | agttgcttgtgatgcctacagatac |
| | | aggcacaaacctcagcaggaagctg |
| | | gacgacctccaactgtgcctgtcgt |
| | | ttatattcgacctcaccaaaaatgt |
| | | ggccccaaggatttgtttaaaaaga |
| | | ttactgagtacctcaagtatcgggt |
| | | aacaaaagggactgtatctgatttt |
| | | cgagataggacgatagaagtactca |
| | | agggttgtggcgtagagatgctaat |
| | | tattgatgaagctgaccgtctcaag |
| | | cctgaaacttttgctgatgtgcgag |
| | | atattgccgaagatttaggaattgc |
| | | tgtggtactggtaggaacagaccgt |
| | | ttggatgcggtaattaagcgggatg |
| | | agcaggttctcgaacgctttcgggc |
| | | gcatcttcgctttggtaaattgtcg |
| | | ggagaggattttaagaacaccgtag |
| | | aaatgtgggaacaaatggttttgaa |
| | | actgccagtatcttctaatctaaag |
| | | agcaaggagatgctacggattctca |
| | | cgtcagcaactgaaggctacattgg |
| | | tcgccttgatgagattcttagggaa |
| | | gctgcaattcgttccttatcaagag |
| | | gattgaagaagattgacaaggctgt |
| | | tttacaggaagtagctaaggagtac |
| | | aa |
| | | (SEQ ID NO: 23) |
| ShTniQ | WP_ | atgatagaagcaccagatgttaaac |
| | 029636334.1 | cttggctattcttgattaaacccta |
| | | tgaaggggaaagcctgagccacttt |
| | | cttggcaggttcagacgtgccaacc |
| | | atttatccgcaagtggattgggtac |
| | | tttggcaggaattggtgctatagtg |
| | | gcacgttgggaaagatttcatttta |
| | | atcctcgccctagtcagcaagaatt |
| | | ggaagcgatcgcatctgtagtagaa |
| | | gtgGCAgctcaaaggttagcccaga |
| | | tgttaccgcctgctggagtgggaat |
| | | gcagcatgagccaattcgcttgtgt |
| | | ggggcttgttatgccgagtcgcctt |
| | | gtcaccgaattgaatggcagtacaa |
| | | gtcggtgtggaagtgcgatcgccat |
| | | caactcaagattttagcaaagtgtc |
| | | caaactgtcaagcaccttttaaaat |
| | | gcctgcgctgtgggaggatgggtgc |
| | | tgtcacagatgtaggatgccgtttg |
| | | cagaaatggcaaagctacagaaggt |
| | | ttga |
| | | (SEQ ID NO: 24) |
| AcTnsB | AFZ56182.1 | atggcagacgaagaatttgaattta |
| | | ctgaaggaacgacgcaagttccaga |
| | | tgctattttgcttgacaagagtaat |
| | | tttgtggtagatccatcccaaatta |
| | | ttctggcaacgtcggatagacataa |
| | | actgacatttaatctaatccagtgg |
| | | cttgctgaatctcccaaccgcacta |
| | | ttaagtctcagagaaaacaggcagt |
| | | tgcaaatacccttgatgtttctact |
| | | cgccaggtggaacgtcttctcaagc |
| | | aatacgatgaagacaagttaagaga |
| | | gacagcaggaatagaacgagccgat |
| | | aagggaaaatatcgagttagcgaat |
| | | attggcaaaacttcatcacaacaat |
| | | ctatgaaaagagtctgaaagaaaaa |
| | | catccaatatcaccagcatccatag |
| | | ttcgtgaagtgaagcgacacgcaat |
| | | tgtggatcttgaacttaagctagga |
| | | gaatatcctcatcaagccactgttt |
| | | atagaattttagatcctttaatcga |
| | | gcaacagaaacggaaaacaagagtt |
| | | agaaatccgggttcgggatcttgga |
| | | tgacagtagtaacacgagatggaga |
| | | gttacttagggctgactttagtaac |
| | | caaattattcagtgtgaccatacta |
| | | aattggatgttcgcatagttgataa |
| | | tcatggcaatttactgtctgatcgt |
| | | ccttggctaactactattgtggata |
| | | ctttttcaagctgtgttgttggttt |
| | | tcgcttatggattaaacaacccggt |
| | | tctacagaggtggctttagctttaa |
| | | gacacgctattttacctaaaaacta |
| | | ccctgaagattatcaacttaataag |
| | | tcttgggatgtatgtggacacccct |
| | | atcaatatttttttactgatggtgg |
| | | taaagattttcgctcaaaacatctc |
| | | aaagctattggtaagaaattaggat |
| | | ttcagtgtgaattacgcgatcgccc |
| | | accggaaggtggtattgtggaacgg |
| | | attttcaaaactattaatactcaag |
| | | ttctcaaagagttacctggttatac |
| | | aggggcaaatgttcaggaacgccca |
| | | gaaaatgcagagaaagaagcctgtt |
| | | taactattcaggatttggataagat |
| | | tctcgctagtttcttttgtgatatc |
| | | tataatcacgagccttatcctaaag |
| | | agcctcgtgatacgagatttgaacg |
| | | ctggtttaagggtatgggaggaaaa |
| | | ctacctgaacctttggatgagcgag |
| | | aattagatatttgtttgatgaaaga |
| | | agcccaacgagttgttcaagctcat |
| | | ggatctattcaatttgaaaacctga |
| | | tttatggggagaatttctcaaagca |
| | | cataaaggtgaatatgtaacgctga |
| | | gatatgatccagatcatatcctgag |
| | | tttatatatctacagtggtgaaact |
| | | gatgataatgcaggagaatttttgg |
| | | gttatgctcatgccgttaatatgga |
| | | tacccatgatttaagtatagaagaa |
| | | ttaaaagccctgaataaagagagaa |
| | | gtaatgctcgtaaggagcattttaa |
| | | ctatgatgctttattagcattgggt |
| | | aaacgtaaagaacttgtagaggaac |
| | | ggaaagaggataaaaaggcaaaaag |
| | | aaactcagaacaaaagcgtctccgt |
| | | tctgcatccaagaaaaattccaatg |
| | | ttattgaactacgcaaaagtaggac |
| | | ttccaaatctttgaagaaacaagaa |
| | | aatcaggaagttttaccagagagaa |
| | | tttccagggaagaaatcaagcttga |
| | | gaagatagaacagcaaccacaggaa |
| | | aatctatcagcttcacctaacactc |
| | | aagaagaagagagacataagttagt |
| | | tttctctaaccgtcaaaaaaatttg |
| | | aacaagatttggtaa |
| | | (SEQ ID NO: 25) |
| AcTnsC | AFZ56183.1 | Atggcgcaacctcaacttgcaactc |
| | | aatctattgttgaagtcctagcccc |
| | | aaggttagacatcaaagctcaaatt |
| | | gctaaaactattgatattgaagaga |
| | | tttttagagcttgttttatcactac |
| | | tgatcgggcttcggaatgcttcaga |
| | | tggttagatgaattgcgtattctca |
| | | aacaatgtggtcgaatcattggacc |
| | | aagaaatgtgggaaaaagcagagcc |
| | | gcgcttcactatcgagatgaggata |
| | | aaaaacgagtttcctatgtaaaggc |
| | | ttggtctgcatcgagttctaagcgg |
| | | ctattttcacaaatcctgaaggata |
| | | ttaatcatgctgcaccaacaggtaa |
| | | acgacaggatttacgtccaagatta |
| | | gcgggtagtctggaactatttggat |
| | | tggaattggtgattatagataatgc |
| | | ggaaaatcttcaaaaagaagcactg |
| | | ctagacttgaaacaactttttgaag |
| | | agtgtaatgttcctattgttttagc |
| | | tggaggtaaggagttagatgatctt |
| | | ttacacgattgtgatttgttgacta |
| | | atttcccaacactctatgagtttga |
| | | acggttggaatatgatgatttcaaa |
| | | aaaacattaactacaattgaattgg |
| | | atgttttatctcttccagaagcatc |
| | | taatttagctgagggcaatattttt |
| | | gagattttagcagttagtacagaag |
| | | cacgaatgggaattttaatcaagat |
| | | actaactaaggctgttttacattct |
| | | ctcaaaaatggatttcaccgagttg |
| | | atgaaagtattttagaaaaaattgc |
| | | tagtcgttatggcacaaaatatatt |
| | | cctctcaaaaacagaaatagggatt |
| | | ga |
| | | (SEQ ID NO: 26) |
| AcTniQ | AFZ56184.1 | Atggcacaaaatatattcctctcaa |
| | | aaacagaaatagggattgatgaaga |
| | | tgatgaaattcgcccaaagttaggc |
| | | tatgttgaaccttatgaggaggaga |
| | | gtattagtcattatctagggcgttt |
| | | gcgacggtttaaggctaacagccta |
| | | ccgtcaggatactctttgggaaaaa |
| | | ttgctggactcggtgcaatgatttc |
| | | acgttgggagaagctttatttcaat |
| | | ccttttcctactctacaagagttgg |
| | | aggctttgtcctctgtggtgggagt |
| | | taatgcagatagattaatagaaatg |
| | | ctcccctctcagggaatgacgatga |
| | | agcctagaccaattaggttatgtgg |
| | | ggcttgttatgcagaatctccttgt |
| | | catcggattgagtggcagtgtaagg |
| | | atagaatgaaatgcgatcgccacaa |
| | | tttacgtttattaataaaatgtact |
| | | aattgtgaaactcctttcccgattc |
| | | ccgcagattgggttaaaggtcaatg |
| | | tcctcattgttccctgccttttgca |
| | | aagatggcgaaaaggcaaaggcgtg |
| | | attag |
| | | (SEQ ID NO: 27) |

[0088] Table 4 includes example transposon proteins and other transposon elements, e.g., LE and RE that may be used with donor polynucleotides herein.

TABLE 4
Example Transposon System

| Name/ | | |
|---|---|---|
| Organism/ | | |
| System | | |
| ID (T) | Sequences | Name/Organism/System ID (T) |
| ANNX0200 | TnsB | ATGCTGGACGAGGAATTCGAGTTCACCGAGGAACTGACACAGGCCCCTGA |
| 0026/ | | CGTGATCGTGCTGGACAAGAGCCACTTCGTGGTGGACCCCAGCCAGATCA |
| Scytonema | | TCCTGCAGACCAGCGACAAGCACAAGCTGCGGTTCAACCTGATCAAGTGG |
| hofmannii | | TTCGCCGAGTCTCCCAACATCACCATCAAGAGCCAGCGGAAGCAGGCCGT |
| PCC 7110/ | | GGTTGATACCCTGGGAGTGTCCACCAGACAGGTGGAAAGACTGCTGAAGC |
| T32 | | AGTACCACAACGGCGAGCTGTCTGAAACAGCCGGCGTGCAGAGAAGCGAT |
| | | AAGGGCAAGCTGAGAATCAGCCAGTATTGGGAAGATTACATCAAGACCAC |
| | | CTACGAGAAGTCCCTGAAGGACAAGCACCCCATGCTGCCTGCCGCCGTCG |
| | | TTAGAGAAGTGAAGAGACACGCCATCGTGGACCTGGGACTGAAGCCTGGC |
| | | GATTACCCTCATCCTGCCACCATCTACCGGAATCTGGCCCCTCTGATCGA |
| | | GCAGCACACCCGGAAGAAAAAAGTGCGGAATCCTGGCAGCGGCAGCTGGC |
| | | TGACAGTGGTCACAAGAGATGGCCAGCTGCTGAAGGCCGACTTCAGCAAC |
| | | CAGATCATTCAGTGCGACCACACCGAGCTGGACATCCACATCGTGGATAG |
| | | CCACGGCAGCCTGCTGAGCGATAGACCTTGGCTGACCACAGTGGTGGATA |
| | | CCTACAGCAGCTGCATCCTGGGCTTTCACCTGTGGATCAAGCAGCCTGGC |
| | | AGCACCGAAGTTGCCCTGGCTCTGAGACATGCCATCCTGCCTAAGAACTA |
| | | CCCCGAGGACTACAAGCTGGGCAAAGTGTGGGAGATCTACGGCCCTCCAT |
| | | TCCAGTACTTTTTCACCGATGGCGGCAAGGACTTCAACAGCAAGCACCTG |
| | | AAGGCCATCGGCAAGAAACTGGGCTTCCAGTGCGAGCTGCGGAACAGACC |
| | | TCCTCAAGGCGGCATTGTGGAACGGCTGTTCAAGACCATCAACACCCAGG |
| | | TGCTGAAAGAGCTGCCTGGCTACACAGGCGCCAACGTGCAAGAGAGGCCT |
| | | AAAAACGCCGAGAAAGAGGCCTGCCTGACCATCCAGGATCTGGATAAGAT |
| | | CCTGGCCAGCTTCTTCTGCGACATCTACAACCACGAGCCGTATCCTAAAG |
| | | AGCCCCGGAACACCAGATTCGAGCGGTGGTTTAAAGGCATGGGCGGCAAG |
| | | CTGCCTGAGCCTCTGGATGAGAGAGAGCTGGATATCTGCCTGATGAAGGA |
| | | AGCTCAGAGAGTCGTTCAGGCCCACGGCTCCATCCAGTTCGAGAACCTGA |
| | | TCTACAGAGGCGAGGCCCTGAAAGCCTACAGGGGCGAGTATGTGACCCTG |
| | | AGATACGACCCCGATCACGTGCTGACCCTGTACGTGTACTCTTGCGAGGC |
| | | CGACGACAACGCCGAGGAATTTCTGGGATATGCCCACGCCATCAACATGG |
| | | ACACCCACGACCTGAGCATCGAGGAACTCAAGACCCTGAACAAAGAGCGG |
| | | AGCAAGGCCAGAAGCGACCACTACAACTACGATGCCCTGCTGGCCCTGGG |
| | | CAAGAGAAAAGAACTGGTGGAAGAGAGGAAGCAGGACAAGAAGGCCAAGC |
| | | GGCAGAGCGAGCAGAAGAGACTGAGAACCGCCAGCAAGAAAAACTCCAAT |
| | | GTGATCGAGCTGAGAAAGTCCAGAGCCAGCAGCAGCTCCAGCAAGGACGA |
| | | CCGGCAAGAGATCCTGCCTGAGAGAGTGTCTCGGGACGAGCTGAAGCCCG |
| | | AGAAAACAGAGCTGAAGTACGAGGAAAACCTGCTCGCCCAGACCGACACA |
| | | CAGAAGCAAGAGCGGCACAAACTGGTGGTGTCCGACCGGAAGAAGAACCT |
| | | GAAGAACATCTGGTGA |
| | | (SEQ ID NO: 28) |
| | TnsC | ATGGCCATCTCTCAGCTGGCCACACAGCCCTTCGTGGAAGTGCTGCCTCC |
| | | TGAGCTGGATAGCAAGGCCCAGATCGCCAAGACCATCGACATCGAGGAAC |
| | | TGTTCCGGATCAACTTCATCACCACCGACCGGTCCAGCGAGTGCTTCAGA |
| | | TGGCTGGACGAGCTGCGGATCCTGAAGCAGTGCGGCAGAATCATCGGCCC |
| | | CAGAAACGTGGGCAAGAGCAGAGCCGTGCTGCACTACCGGAACGAGGACA |
| | | AGAAACGGGTGTCCTACGTGAAGGCTTGGAGCGCCAGCAGCAGCAAGAGA |
| | | CTGTTCAGCCAGATTCTGAAGGACATCAACCACGCCGCCTCCACCGGCAA |
| | | GAGACAGGATCTTAGACCTAGACTGGCCGGCAGCCTGGAACTGTTTGGAC |
| | | TGGAACTGGTCATCGTGGACAACGCCGAGAACCTGCAGAAAGAGGCCCTG |
| | | CTGGACCTCAAGCAGCTGTTCGAGGAATGCCACGTGCCAATCGTGCTCGT |
| | | CGGCGGAAAAGAGCTGGACGACATCCTGGAAGATTTCGACCTGCTGACCA |
| | | ACTTTCCCACACTGTACGAGTTCGAGCGGCTGGAACACGACGACTTCATC |
| | | AAGACCCTGAAAACCATCGAGCTGGACATCCTGAGCCTGCCTGAGGCCTC |
| | | TAAGCTGAGCGAGGGCAACATCTTTGCCATCCTGGCCGAGTCTACCGGCG |
| | | GCAAGATCGGCATCCTGGTCAAGATTCTGACCAAGGCAGTGCTGCACAGC |
| | | CTGAAGAAAGGCTTCGGCAAGGTGGACGAGTCTATCCTGGAAAAGATCGC |
| | | CAGCAGATACGGCACCAAATACGTGCCCATCGAGAACAAGAACCGCAACG |
| | | ACTGA |
| | | (SEQ ID NO: 29) |
| | TniQ | ATGATCGAGGACGACGAGATCAGACTGCGGCTGGGCTACGTGGAACCTCA |
| | | TCCTGGCGAGAGCATCAGCCACTACCTGGGCAGACTGAGAAGATTCAAGG |
| | | CCAACAGCCTGCCTAGCGGCTATGCCCTGGGAAAGATTGCCGGACTGGGC |
| | | AGCGTTCTGACCAGATGGGAGAAGCTGTACTTCAACCCATTTCCGACACA |
| | | GCAAGAGCTGGAAGCCCTGGCTCAAGTGATCCAGGTGGAAGTGGAAAAGC |
| | | TGAGAGAGATGCTGCCCACCAAGGGCGTGACCATGATGCCCAGACCTATC |
| | | AGACTGTGCGCCGCCTGTTATGCCGAGTCTCCCTACCACAGAATCGAGTG |
| | | GCAGTTCAAGGACAAGATGAAGTGCGACCGGCACCAGCTGAGACTGCTGA |
| | | CCAAGTGCACCAACTGTCAGACCCCTTTTCCTATTCCTGCCGACTGGGAG |
| | | AAGGGCGAGTGCAGCCACTGCTTTCTGAGCTTCGCCAAGATGGTCAAGTG |
| | | CCAGAAACGGCGGTGA |
| | | (SEQTDNO: 30) |
| | LE | TCGTTCTGCTTTCCAGAGATTGGTGGATGACTTCCCAACGACGGTAAGGG |
| | | AGATAACTTTGCGTCACCCAGGTGAGTGCTTGAGAGGGGGTAGCATCGAG |
| | | AGGTAATGCTTGGGGTTGGTGTACATTCGCAAATTATATGTCGCAATTCG |
| | | CAAATTAGTGTCGCAATTACTTCTAATAGCTGAGATCTTTATTGCGTAGG |
| | | ACTTACAAGCTATTTATCCATAAAACTGAGTAATTTGCCTGTTTCGCAAA |
| | | TTAGATGTCGCAAATCCTATTTTCGCAAATTAAATGTCGTTTATTAAGAT |
| | | TTGCCTGTTTCGCAAATTAGATGTCGCATTTTTGCCACATTAGTGGTACT |
| | | TTAGTACCTAAAGTGTTAATCAGTGGTTTTCACTCCAATGTTAGACGAAG |
| | | AATTTGAGTTCACTGAGGAATTGACGCAAGCTCCAGATGTTATTGTGCTT |
| | | GACAAGAGTCATTTTGTGGTAGACCCATCCCAAATTATTCTGCAAACATC |
| | | (SEQ ID NO: 31) |
| | RE | GACTCTGTGCCTTTTTTGGAGTGTTGTTCATGCAAAATTTGAGAATCTTG |
| | | ACTAGAACTGAAACTCTTGCTAAGTAACGCTTTCAACGAAAATAAAGCCA |
| | | TATAGTACAAATTTACTAAAAATCAACAAAATCAACACCCTAGGGTAAGT |
| | | CTGTCAATTAGTCCAGTAGCAAGACATTATGTTAGACGACATTAATTTGT |
| | | TAACGTTAGTTGGAACTAATTCGACGACATTAATTCGTTAACAGCGACAT |
| | | TAATTTGTTAATCGACACTAAATGGAGAAACAGGACGACATTAATTTGCG |
| | | AAAAGTTCCTATAATTGAATTGATGAGACAAACTATTCTAAACGACATTA |
| | | ATTTGCGAAAAACGACACAAATTTGCGAATTACGACATTTAATTTGCGAA |
| | | TGTACATTTGCGGTTCATTTAAGTAGGTAGTCTTTGGGCGGGAAAGGAGT |
| | | AGAAAACACTATAAACTACTTAAAAGAACATAATTTAAACCGCAGCAACT |
| | | (SEQ ID NO: 32) |
| AP014642/ | TnsB | ATGCAGCTGCCCATCGAGTTCCCTGAGAGCGAACAGGTGTCCCGCGAACT |
| Leptolyngbya | | GGTGGAACAGAACCAGATCGTGACCGAGCTGAGCGACGAGGCCAAGCTGA |
| boryana | | AGATCGAAGTGATCCAGAGCCTGCTGGAACCCTGCGACAGAGCCACCTAC |
| dg5/T33 | | GGCAACAGACTGAGAGATGCCGCCACCAGACTGGGCAAGAGCGTCAGAAC |
| | | AGTGCAGCGGATGGTCAAGAGCTGGCAAGAGGAAGGCATTGCCGGCCTGA |
| | | GCAATGGCGAGAGAACAGACAAGGGCGAGCACCGGATTGAGCAAGAGTGG |
| | | CAGGACTTCATCATCAAGACCTACCAAGAGGGCAACAAGAACGGCAAGCG |
| | | GATGACCCCTGCTCAGGTGGCCATCAGAGTGAAAGTGAAGGCCCAGCAAG |
| | | AGGGGATCACAAAGTACCCCAGCCACATGACCGTGTACCGGGTGCTGAAT |
| | | CCCCTGATCCAGCGCAAGACCGAGAAGCAGAATGTGCGGAGCATCGGCTG |
| | | GCAGGGCTCTAGACTGAGCCTGAAAACCAGAGATGGCAACAGCCTGTCCG |
| | | TGGAATACTCCAATCAAGTGTGGCAGTGCGACCACACCAGAGCCGATATC |
| | | CTGCTGGTGGATCAGCACGGCGAGCTGATTGGTAGACCTTGGCTGACCAC |
| | | CGTGGTGGACACCTACAGCAGATGTATCGTGGGCGTGAACCTGGGCTTCG |
| | | ATGCCCCTTCTTCTGACGTGGTGGCACTGGCCCTGAGACACGCCATTCTG |
| | | CCCAAGACATACCCCGACAGATACCAGCTGAACTGCGACTGGGGCACATA |
| | | CGGCAAGCCCGAGCACTTCTTTACCGACGGCGGCAAGGACTTCAGAAGCA |
| | | ACCATCTGCAGCAGATCGCCGTGCAGATTGGCTTCACCTGTCACCTGAGA |
| | | AACAGACCCTCTGAAGGCGGCGTGGTGGAAAGACCTTTCGGCACCCTGAA |
| | | CACCGAGTTCTTCAGCATCCTGCCTGGCTACACCGGCAGCAACGTGCAGA |
| | | AAAGACCCGAGGAAGCCGAGGAAAGCGCCAGCCTGACACTGAGAGAGCTG |
| | | GAACAGTTCCTCGTGCGGTACATCACCGACCGGTACAACCAGGGAATCGA |
| | | CGCCAGAATGGGCGACCAGACCAGGTTTCAGAGATGGGAAGCTGGCCTGC |
| | | TGGCCAATCCTAGCGTGCTGACAGAGCGCGAGCTGGACATCTGCCTGATG |
| | | AAGCAGACCCGCAGAACCGTGTACAGAGAGGGCTACCTGAGATTCGAGAA |
| | | CCTGATCTACCGGGGCGAGAATCTGGCCGGATATGCCGGCGAAACAGTGA |
| | | CCCTGAGATACGAGCCCAGAGACATCACCACCGTGTTCGTGTACCACCAA |
| | | GAGCAGGGCAAAGAGGTGTTCCTGACCAGAGCACACGCCCAGGACCTGGA |
| | | AACCGAGACAATCAGCCTGTATGAGGCCAAGGCCAGCAGCCGGCGGATTA |
| | | GAGATGTGGGCAAGACCATCAGCAACCGGTCCATCCTGGAAGAAGTGCGC |
| | | GACAGGGATCTGTTCGTGCAGAAGAAAACACGGAAAGAGCGGCAGAAGGC |
| | | CGAGCAGGCCGAAGTGAAGATTGATCAGGTGCCAAGTCCTCCTCAGGTGC |
| | | TGCATCTGGATGAGGCCAGCCAGTTCGAGACAGAGATCGTGGAAACCCAG |
| | | TGCGTGGAAATCAGCGAGATCGAGGACTACGAGAAGCTGCGGGACGACTT |
| | | CGGATGGTGA |
| | | (SEQ ID NO: 33) |
| | TnsC | ATGATGGCCAACGAGGCCCAGTCTATCGCCCAGACACTTGGAAGCCTGCC |
| | | TCTGACATCTGAGCTGCTGCAGGCCGAGATCCACCGGCTGACAAAGAAAA |
| | | GCGTGGTGTCCCTGAGCCAGGTGCAGAGCCTGCACAATTGGCTGGAAGGC |
| | | AAGAGACAGGCCCGGCAGTCTTGTAGAGTTGTGGGCGAGAGCAGAACCGG |
| | | CAAGACCCTGGCCTGTGATGCCTACAGACTGCGGCACAAGCCTACACAGC |
| | | AGGCCGGAAAGCCTCCTATCGTGCCCGTGGTGTATATCCAGGTGCCACAA |
| | | GAGTGCGGCAGCAAAGAGCTGTTCCAGATCATCATCGAGCACCTGAAGTA |
| | | CCAGATGGTCAAGGGCACCGTGGCCGAGATTCGCGAGAGAACCATGAGAG |
| | | TGCTGAAAGGCTGCGGCGTGGAAATGCTGATCATCGACGAAGCCGACCGG |
| | | CTGAAGCCTAAGACCTTTGCCGATGTGCGGGACATCTTCGACAAGCTGGA |
| | | AATCAGCGTGGTGCTCGTGGGCACCGACAGACTGGATGCCGTGATCAAGA |
| | | GGGACGAACAGGTGTACAACCGGTTCCGGGCCTGCCACAGATTTGGAAAA |
| | | CTGGCCGGCGAGGAATTCCGGCGGACAATCGAGATTTGGGAGAAGCAGAT |
| | | CCTGAAGCTGCCCGTGGCCAGCAACCTGACATCTAAGGCCGCTCTGAAGA |
| | | TCCTGGGCGAGACAACAGCCGGCTACATCGGACTGCTGGACATGGTGCTG |
| | | AGAGAGGCCGCTATCAGAGCCCTGAAGCAGGGCAAGACCAAGATCGACCT |
| | | GGAAATCCTGAAAGAGGTGTCCACCGAGTACCGGTGA |
| | | (SEQ ID NO: 34) |
| | TniQ | ATGATCGAGCACAGCGAGATCCAGCCATGGTTCTTTCACGTGGAAGCCCT |
| | | GGAAGGCGAGAGCATCTCTCACTTTCTGGGCAGATTCCGGCAGGCCAACG |
| | | AGCTGACACCTTCTGGCGTGGGCAAGATCTCTGGACTCGGCGGAGCTATT |
| | | GCCAGATGGGAGAAGTTCCGGTTCAACCCCTATCCTACACAGCAGCAGTT |
| | | CGAGAAGCTGAGCACCGCCACAGGCATCAGCGTTGAGCAGCTGTGGAAGA |
| | | TGATGCCTCCTGAAGGCGTGGGAATGCAGCTGGAACCCATCAGACTGTGC |
| | | GCCAGCTGTTATGCCGAGCTGCCTTGTCACCAGATCCAGTGGCAGTTCAA |
| | | GGACACCCAGGGATGCGAAGTGCACGGCCTGAGACTGCTGAGCGAGTGCC |
| | | CTAATTGCAAGGCCCGGTTTAAGCCTCCTGCCACTTGGAGCGATAGCAAG |
| | | TGCCACCGGTGCTTCATGCTGTTCAGCGAGATGCGGAACCGGCAGAAGAG |
| | | ACACAGCTTCAGCAGATGA |
| | | (SEQ ID NO: 35) |
| | LE | TTTAGGAGCGTTCTCAAATTTCACAACTCAAATCGGATTGCTCTATGTGT |
| | | AGATTGAAAGAACAGCAAATTGCTAGCAGAATAAAGTGTTATTCGACAAT |
| | | TGTTGTCGAATAACACTTTAAATGTCGTCATAACGAATTGATGTCGTTCA |
| | | GCCTCAACAACTTAAACTTCCTATTAATATTGACTTTCAGCTCTTTCAGA |
| | | GCGATCGCGCCCTTGCAGGACGATTAACATTATCCATGTCGCTTTTCAGA |
| | | GTAGTAACAAATTCAGTGTCGTGTTTTACGATCAGGGGTTTAACACAATC |
| | | AGCGTCATGATTTTGAGATCTCAATAGATGACAACCAGCAAAAGGACAAC |
| | | CTGACTTCAAAATCTACAATCAGACCACAATCAAGGTGCGATCGCGGCAA |
| | | GATTCCCATAAACCTCAGTTTCCGCATAGTGTTTAGAAAAAATCTGCTTG |
| | | AAAATCTATTTAGCTAGAAACCCAGAAATTCTAGCTAAATAAGAATTACT |
| | | (SEQ ID NO: 36) |
| | RE) | GGTTTGCGGCAAGGGGGCGATTGAAGAGTAACTTAGTCTTTTGACAACTT |
| | | TAATAGGCACAATCTTTCGGTTAACAGTGGGTGGATTGAAAGGACTGCCT |
| | | GACTCGGGGTTTTAATTTAGAAATATTTGCCCCTCGCTATAACGAGCAGA |
| | | GTTAGCATTCGTTTTAACTGGGTAGAGTCTGTACTGTAAAATGTTGAAGT |
| | | GGATAAGAATTTGAATGAGCATTCAACTGCTTGAAGCTCTGATGACAAGA |
| | | ATTTGTTAACGAATGATTTCTTACCCCTCGACGACAAGAAGCTGTTAAAA |
| | | CGACACTAAATTGTTAACGACGACATCAATCCGTTAACGACGACAAATAA |
| | | AGTGTTATTCGACAACAATCACACGAATTTAAACAAAAAATTGCCTGACT |
| | | CTTAAAAGCCCCCAGAGTCAGGCAGTCTACCTGTAAGGCACGCCTTTAAC |
| | | CGGATACACCAAACAAACTTAGTTGCCCCCTAGTTGCTTAGCTTTTCCGA |
| | | (SEQ ID NO: 37) |
| AP014821/ | TnsB | ATGACCATCGAGAACCAGATCAGCGAGAGCCAAGAGCTGATCTCCCAGCT |
| Geminocystis | | GAGCCCTGAGGAACAGGCCATTGCCGACGTGATCGAGGATCTGGTGCAGC |
| sp. NIES- | | CCTGCGACAGAAAGACATACGGCGCCAAGCTGAAGAAGGCCGCCGAGACA |
| 3709/T34 | | CTGAACAAGAGCGTGCGAACCGTGCAGCGGTACATCAAAGAGTGGGAAGA |
| | | GAAGGGCCTGCTGGCCATCAAGAAGGGCAACAGAAGCGACCAGGGCACCT |
| | | ACCGGATCGAGAAGAGACTGCAGGACTTCATCGTGAAAACCTACCGCGAG |
| | | GGCAACAAGGGCAGCAAGAGAATCAGCCCCAAACAGGTGTACCTGCGGAC |
| | | AATGGCCCAGGCCAAAGAATGGTCCATCGATCCTCCAAGCCACATGACCG |
| | | TGTACCGGATTCTGAACCCCATCATCGAGGAAAAAGAAAACAAGAAACGC |
| | | GTGCGGAACCCCGGCTGGCGGGGAACAAAACTGGCTGTGTCTACCAGAAG |
| | | CGGCAACGAGATCAACGTGGAATACTCCAACCACGCCTGGCAGTGCGATC |
| | | ACACCAGAGCCGATATCCTGCTGGTGGACCAGTTTGGCCAACTGCTGGGT |
| | | AGACCTTGGCTGACCACAGTGGTGGACACCTACAGCAGATGCATCATGGG |
| | | CATCAACCTGGGCTTCGACGCCCCTAGCTCTCAGGTTGTGTCTCTGGCCC |
| | | TGAGACACGCCATGCTGCTGAAGTCCTACAGCTCCGATTACGGCCTGCAC |
| | | GAGGAATGGGGCACATACGGCAAGCCCGAGTACTTCTACACCGACGGCGG |
| | | CAAGGACTTCCGGTCCAATCATCTGCAGCAGATCGGCCTGCAGCTGGGCT |
| | | TCACATGCCACCTGAGAAGCAGACCTAGCGAAGGCGGCGTGGTGGAAAGA |
| | | CCCTTCAAGACCCTGAACACAGAGGTGTTCAGCACCCTGCCTGGCTACAC |
| | | AGGCGGCAACGTGCAAGAGAGATCTGAGGACGCCGAGAAGGACGCCAGCC |
| | | TGACACTGAGACAGCTGGAAAGAATCATCGTGCGCTACATCGTGGACAAC |
| | | TACAACCAGCGGATGGACGCCAGAATGGGCGAGCAGACCAGATTCCAGAG |
| | | ATGGGATAGCGGCCTGCTGAGCATCCCTGATCTGCTGAGCGAACGCGACC |
| | | TGGACATCTGCCTGATGAAGCAGTCTAGACGGCGGGTGCAGAAAGGCGGC |
| | | TACCTGCAGTTCGAGAACCTGATGTACCAGGGCGAGTACCTGGCCGGCTA |
| | | TGAGGGCGAGACAGTGATCCTGAGATACGACCCCAGAGACATCACCGCCA |
| | | TCCTGGTGTACAGAAACGAAGGCAACAAAGAAGTGTTCCTGACCAGAGCC |
| | | TACGGCCTGGACCTGGAAACAGAGAGCATGAGCTGGGAAGATGCCAAGGC |
| | | CAGCGCCAAGAAAGTGCGCGAGTCTGGCAAGAACCTGAGCAACAGATCCA |
| | | TCCTGGCCGAAGTGAAAGAGCGGCACACCTTCAGCGACAAAAAGACCAAG |
| | | AAAGAGAGGCAGCGGCAAGAGCAAGAACAAGTGAAGCCTTATATTCCATC |
| | | TCCGGTGCTGAAAGAAGTCAAAGAGCAGACCGACAAGGCCACCGACACCG |
| | | ACATGAGCGAGGAACCCATCGTGGAAGTGTTCGACTACAGCCAGCTCCAG |
| | | GACGACTACGGCTTCTGA |
| | | (SEQ ID NO: 38) |
| | TnsC | ATGGAAGCCAAGGCTATCGCCCAAGAGCTGGGCAACATCGAGATCCCCGA |
| | | AGAGAAGCTGCAGATGGAAATCGAGCGGCTGAACAGCAAGACCCTGGTGT |
| | | CCCTGGAACAGGTGGCCAAGCTGCACGAGTACTTCGAGGGCAAGAGACAG |
| | | AGCAAGCAGAGCTGCAGAGTCGTGGGCGAGAGCAGAACCGGAAAGACCAT |
| | | GGCCTGCGACAGCTACCGGCTGAGACACAAGCCCATCCAGAAAGTGGGAC |
| | | ACCCTCCTCAGGTGCCCGTGGTGTACATCCAGATTCCTCAGGACTGCGGC |
| | | ACCAAAGAGCTGTTTCAGGGCATCATCGAGTACCTGAAGTACCAGATGAC |
| | | CAAGGGCACAATCGCCGAGATCAGACAGCGGGCCATCAAGGTGTTGCAAG |
| | | GCTGCGGCGTGGAAATGATCATCATCGACGAGGCCGACCGGTTCAAGCCC |
| | | AAGACCTTTGCTGAAGTGCGGGACATCTTCGACAGACTGAACATCCCCAT |
| | | CGTGCTCGTGGGCACCGATAGACTGGACACCGTGATCAAGCGGGACGAAC |
| | | AGGTGTACAACCGGTTCAGAAGCTGCTACAGATTCGGCAAGCTGTCTGGC |
| | | GCCGACTTCCAGAACACCGTGAACATCTGGGAGAAACAGGTGCTGAAGCT |
| | | GCCCGTGGCCAGCAACCTGATCCAGACCAAGATGCTGAAACTGATCGCCG |
| | | AGGCCACAGGCGGCTATATCGGCCTGATGGACACCATCCTGAGAGAGAGC |
| | | GCCATCAGAAGCCTGAAGCGGGGCCTGAACAAGATCACCTTCGAGATCCT |
| | | GAAAGAAGTGACCCAAGAGTTCAAGTGA |
| | | (SEQ ID NO: 39) |
| | TniQ | ATGGACCTGCAGATCCAGAACTGGCTGTTCATCCTGGTGCCTTACGAGGG |
| | | CGAGAGCATCAGCCACTTTCTGGGCAGATTCAGACGGGCCAACAGCCTGT |
| | | CTTGTGGCGGACTGGGACAAGCCACAGGACTGTACTCTGCCATTGCCAGA |
| | | TGGGAGAAGTTCCGGTTCAACCCTCCACCTAGCCTGAAGCAGCTGGAAAA |
| | | GCTGAGCGAGATCGTGCAGGTCGAGATGGCCACACTGCAGACCATGTTTC |
| | | CCAGCGCTCCCATGAAGATGACCCCTATCAGAATCTGCAGCGCCTGCTAC |
| | | GGCGAGAACCCCTACCATCAGATGAGCTGGCAGTACAAAGAAATCTACAG |
| | | ATGCGACCGGCACAACCTGAACATCCTGAGCGAGTGCCCTAACTGCGCCG |
| | | CCAGATTCAAGTTCCCCAACCTTTGGTTCGAGGGCTTCTGCCACAGATGC |
| | | TTCACCCCTTTCGAGCAGATGCCCCAGAGCTGA |
| | | (SEQ ID NO: 40) |
| | LE | AGAAAGTGGACGAGAAGCTCTATTTTGCTATCCTTGTTTTAATTTTGGCA |
| | | GTAATTGTTTGACTACTTATTAAAATAAAATTGATGGAAAAGTTAAAAAT |
| | | CAGTCTGAAAATGCTTTTGAATAACTTTGATAAAAAATCTTGTACAGTAA |
| | | CAGATTATTTGTCGTGATAACAAATTCGTGTCATCTAAAAATAAGACTCT |
| | | TAAAATCCTTATATATCAACAATTATAACTTATCCTTACCCTAAAATCAC |
| | | ACTCGATTGTATCTTAAAATAGATTAACAAATTAAGTGTCATTTTCCCTA |
| | | AAAATAACAAATTAGATGTCGCCTTCGGAAAAGGCGATTTTTTTTGTTTT |
| | | TGAGTGGCAATTCACAGATTAAATGTCATAGAATAATAAGTACACATCAA |
| | | CTTTGATTTTATTAAACATAAAAATATCAGCTATGACTATTGAAAATCAA |
| | | ATTTCTGAATCTCAGGAACTGATTTCTCAACTTTCTCCCGAAGAACAGGC |
| | | (SEQ ID NO: 41) |
| | RE | GCTTTTATTTTGAACTAAAACTCTACTAATTAGAATCTGTCATCGAGACG |
| | | AAACAAAACGATCATATTTTCTTTTTAAAGTTATAATTTCAATAGTGCCG |
| | | TAGATCAAGTTTTAACAACCTCTGTTCTATGAAAAATGAGGAGTAGTTTA |
| | | CTTTTTACAAGAAGTTTGCTTTCGGCTCCTGCTAACTACTTGCCCTGATG |
| | | CTGTCTATCTTAGGATAGAGAAACTAGGCGCACTCCCAGCAATAAGGGTG |
| | | CAGGTGTACTGCTATAGCGGTTAGCAAATCACTTTCGATCGAGGAAGAAT |
| | | TCTCTTTGAGAATTGAAAGCGAGTCCTGTCGCACCCAATCATTTAGACGA |
| | | CATTAATCTGTTATCACGTCATCTAATTTGTTAAGACGACACTAATCTGT |
| | | TACCGATGACAAATAATTTGTTACTGTACATCAATTTAAAATACGAGCCA |
| | | ACGGCTAAGTAATACACGGGTGCGACAGGACTCGAACCTGTGACCGACTG |
| | | (SEQ ID NO: 42) |
| AP017295/ | TnsB | ATGCCCGACAAAGAGTTTGGACTGACCGGCGAGCTGACCCAGATTACCGA |
| Nostoc sp. | | GGCCATCTTTCTGAGCGAGAGCAACTTCGTGGTGGACCCTCTGCACATCA |
| NIES-3756/ | | TCCTGGAAAGCAGCGACAGCCAGAAGCTGAAGTTCAACCTGATCCAGTGG |
| T35 | | CTGGCCGAGTCTCCCAACAGACAGATCAAGAGCCAGCGGAAGCAGGCCGT |
| | | GGCTGATACACTGGGAGTGTCCACCAGACAGGTGGAACGGCTGCTGAAAG |
| | | AGTACAACGGCGACCGGCTGAATGAGACAGCTGGCGTGCAGAGATGCGAC |
| | | AAGGGCAAGCACAGAGTGTCCGAGTACTGGCAGCAGTACATCAAGACCAT |
| | | CTACGAGAACAGCCTGAAAGAAAAGCACCCTATGAGCCCCGCCAGCGTCG |
| | | TGCGGGAAGTGAAAAGACACGCCATCGTGGATCTGGGCCTCGAGCACGGC |
| | | GATTATCCTCATCCTGCCACCGTGTACCGGATCCTGAATCCTCTGATCGA |
| | | GCAGCAGAAGCGGAAGAAGAAGATCAGAAACCCCGGCAGCGGCAGCTGGC |
| | | TGACCGTGGAAACAAGAGATGGCAAGCAGCTGAAGGCCGAGTTCAGCAAC |
| | | CAGATCATCCAGTGCGACCACACCGAGCTGGACATCAGAATCGTGGACAG |
| | | CAACGGCGTGCTGCTGCCCGAAAGACCTTGGCTGACAACCGTGGTGGATA |
| | | CCTTCAGCAGCTGCGTGCTGGGCTTTCACCTGTGGATCAAGCAGCCTGGA |
| | | AGCGCCGAAGTTGCCCTGGCTCTGAGACACAGCATCCTGCCTAAGCAGTA |
| | | CCCTCACGACTACGAGCTGAGCAAGCCTTGGGGCTACGGCCCTCCATTCC |
| | | AGTACTTTTTCACCGACGGCGGCAAGGACTTCAGATCCAAGCACCTGAAA |
| | | GCCATCGGCAAGAAACTGCGGTTTCAGTGCGAGCTGCGGGACAGACCTAA |
| | | TCAAGGCGGCATCGTGGAACGGATCTTTAAGACCATCAACACCCAGGTGC |
| | | TGAAGGACCTGCCTGGCTACACAGGCAGCAACGTGCAAGAGAGGCCTGAG |
| | | AACGCCGAGAAAGAGGCCTGTCTGGGCATCCAGGACATCGACAAGATCCT |
| | | GGCCAGCTTCTTCTGCGACATCTACAACCACGAGCCGTATCCTAAGGACC |
| | | CCAGAGAGACAAGATTCGAGCGGTGGTTCAAAGGCATGGGCGGCAAGCTG |
| | | CCTGAGCCTCTGGATGAGAGAGAGCTGGATATCTGCCTGATGAAAGAAAC |
| | | CCAGAGAGTGGTGCAGGCCCACGGCAGCATCCAGTTCGAGAACCTGATCT |
| | | ACAGAGGCGAGAGCCTGAGAGCCTACAAGGGCGAGTACGTGACCCTGAGA |
| | | TACGACCCCGACCACATCCTGACACTGTACGTGTACAGCTGCGACGCCAA |
| | | CGACGATATCGGCGACTTTCTGGGCTATGTGCACGCCGTGAACATGGACA |
| | | CCCAAGAGCTGTCCATCGAGGAACTGAAGTCCCTGAACAAAGAGCGGAGC |
| | | AAGGCCAGAAGAGAGCACAGCAATTACGACGCCCTGCTGGCCCTGGGCAA |
| | | GAGAAAAGAGCTGGTCAAAGAGCGCAAGCAAGAGAAGAAAGAGCGGCGGC |
| | | AGGCCGAGCAGAAGAGACTGAGAAGCGGCAGCAAGAAAAACTCCAACGTG |
| | | GTGGAACTGAGAAAGAGCCGGGCCAAGAACTACGTGAAGAACGACGACCC |
| | | CATCGAGGTGCTGCCAGAGAGAGTGTCCCGGGAAGAGATCCAGGTGCCAA |
| | | AGACCGAGGTGCAGATCGAGGTGTCCGAGCAGGCCGACAACCTGAAGCAA |
| | | GAAAGACACCAGCTCGTGATCAGCAGACGGAAGCAGAACCTGAAGAACAT |
| | | CTGGTGA |
| | | (SEQ ID NO: 43) |
| | TnsC | ATGGCCCAGAGCCAGCTGGTCATCCAGCCTAACGTGGAAACACTGGCCCC |
| | | TCAGCTGGAACTGAACAATCAGCTGGCCAAGGTGGTGGAAATCGAGGAAA |
| | | TCTTCAGCAACTGCTTCATCCCCACCGACCGGGCCTGCGAGTACTTCAGA |
| | | TGGCTGGACGAGCTGCGGATCCTGAAGCAGTGTGGCAGAGTTGTGGGCCC |
| | | CAGAGATGTGGGCAAGAGCAGAGCCTCTGTGCACTACAGAGAAGAGGACC |
| | | GGAAGAAAGTGTCCTACGTCAGAGCTTGGAGCGCCAGCAGCAGCAAGAGA |
| | | CTGTTCAGCCAGATTCTGAAGGACATCAACCACGCCGCTCCTACCGGCAA |
| | | GAGAGAGGATCTCAGACCTAGACTGGCCGGCAGCCTGGAACTGTTCGGAA |
| | | TCGAGCAAGTGATCGTGGACAACGCCGACAACCTGCAGAGAGAGGCACTG |
| | | CTGGACCTCAAGCAGCTGTTCGACGAGAGCAACGTGTCCGTGGTGCTCGT |
| | | TGGAGGCCAAGAGCTGGACAAGATCCTGCACGACTGCGACCTGCTGACCA |
| | | GCTTTCCCACACTGTACGAGTTCGACACCCTGGAAGATGACGACTTCAAG |
| | | AAAACCCTGAGCACCATCGAGTTCGATGTGCTGGCACTGCCCCAGGCCTC |
| | | TAATCTGTGTGAAGGCATCACCTTCGAGATCCTGGTGCAGAGCACAGGCG |
| | | GCAGAATCGGCCTGCTGGTTAAGATCCTGACCAAGGCCGTGCTGCACAGC |
| | | CTGAAGAATGGCTTCGGCAGAGTGGACCAGAACATCCTGGAAAAGATCGC |
| | | CAACAGATACGGCAAGCGGTACATCCCTCCTGAGAACCGGAACAAGAACA |
| | | GCTGA |
| | | (SEQ ID NO: 44) |
| | TniQ | ATGGAAAAGGACACGTTCCCTCCAAAGACCGAGATCAGAATCCACGACAA |
| | | CCACGAGGCCCTGCCTAGACTGGGCTACGTGGAACCTTATGAGGGCGAGA |
| | | GCATCAGCCACTACCTGGGCAGACTGCGGAGATTCAAGGCCAACAGCCTG |
| | | CCTAGCGGCTACAGCCTGGGAAAGATCGCCGGAATTGGCGCCGTGACCAC |
| | | CAGATGGGAGAAGCTGTACTTCAACCCATTTCCTAGCAGCGAGGAACTGG |
| | | AAGCCCTGGGCAAGCTGATTGGCGTGCCAGCCAACCGGATCTACGAGATG |
| | | TTGCCTCCTAAGGGCGTGACCATGAAGCCCAGACCTATCAGACTGTGCGC |
| | | CGCCTGTTATGCCGAGGTGCCCTGTCACAGAATCGAGTGGCAGTACAAGG |
| | | ACAAGCTGAAGTGCAACCACCACAACCTGGGCCTGCTGACCAAGTGCACC |
| | | AACTGCGAGACACCCTTTCCTATACCTGCCGACTGGGTGCAGGGCGAGTG |
| | | CCCTCACTGTTTTCTGCCCTTTGCCAAGATGGCCAAGCGGCAGAAACCCC |
| | | GGTAA |
| | | (SEQ ID NO: 45) |
| | LE | TTGATGGCTGAAAGCTAGGAAATACGTAAATTATGCGTTTAGCACTGTCA |
| | | AATGGACAATAATTCTTTAAAACTGACAATAATTATTTAAAGTACATATT |
| | | GTACATTCGCACATTATATGTCGCAATTTGCAAACAACGACATTAGACGA |
| | | CATTAGCATCTTGAGCATCTAAAACGCTTATCGTATAAAGCTTTCAGGAA |
| | | ATTGTTAATTAAAAACGTTAAATTCCTGACTTCGCACATTGTATGTCGCT |
| | | AACATTAAAGCTCGCAAATTAATGTCGTTAATCTAAATTTTGTCACATTG |
| | | CAAATTCAATGTCGCATTTTCTTCAGTTAATGGTACATTAATACTACCAA |
| | | TAACTACATTCTCCTCGCTTAAATGCCAGACAAAGAATTTGGATTAACCG |
| | | GAGAATTGACACAAATTACAGAAGCTATTTTCCTTAGTGAAAGTAATTTT |
| | | GTGGTCGATCCATTACACATTATTCTGGAATCCTCAGATAGCCAGAAACT |
| | | (SEQ ID NO: 46) |
| | RE | CATCCCGGCTAGGGGTGGGTTGAAAGAGTAAGAAGAATAGAAGTAATTTC |
| | | CTGAAATCAACTATATTTGGACATATTTTAGGAATATAACTAAATTATGG |
| | | GAGGGTTGAAAGGAGCGCTGCGATCAAACAAATGTTAAGGTAAAATAATT |
| | | CGTCTGTAGCAAATACCACAGTTAATGAGTAAGCCATACGACGTTAATTT |
| | | GCGAAAAACTAATATGATTGAATTAACGACGCGAATTAGCGAAAGTAATG |
| | | TTAATTACCTAAAAACGACATCAATTTGCGAAAAGCGACAAATAATGTGC |
| | | GAATGTACACATATGGAGAATAGGGAACTCGAATCCCTGACCTCTGCGGT |
| | | GCGATCGCAGCGCTCTACCAACTGAGCTAATTCCCCTGACTTTGTTGAGT |
| | | GTTCAGTTAATCACACTCGTCCATCATAGAGTATTTTAACATTCAGTTAG |
| | | GGATGGCTGAGATTTGTTGCCAGAAAAAACTTCTTGTACTCGCTCTAGTT |
| | | (SEQ ID NO: 47) |
| AP018178/ | TnsB | ATGTCTGCCCTGGACGTGGACGACGACTTCGAGCTGGAAGAGGACACATA |
| Calothrix | | CCTGCTGGGCGACGAGGACGCCGACCTGTTTGATGATAGCAGCGACGTGA |
| sp. NIES- | | TCCTGGTCAACGAGGACTACGACACCGCCGAAGAGGATAAGAGCGTGGAA |
| 2100/T36 | | TTCCTGGACCAGCGGTTCCTGGAAGATAGCGAGCTGAGACTGAGCGGCGA |
| | | GCAGAGGCTGAAGCTGGAAATCATCAGAAGCCTGGGCGAGCCCTGCGACA |
| | | GAAAGACATATGGCCAGAAGCTGAAAGAGGCCGCACAGAAGCTGGGCAAG |
| | | AGCGAGAGAACAGTGCGGAGACTGGTCAAGGCCTGGCAAGAGAATGGCCT |
| | | GGCCACCTTTGCCGAAACCGCCAGAGCTGATAAGGGCCAGACCAGAAAGA |
| | | GCGAGTACTGGTACAACCTGACCGTCAAGACCTACAAGGCCCGGAACAAG |
| | | GGCAGCGACCGGATGACAAGAACACAGGTGGCCGAGAAGATCGCCATCAG |
| | | AGCCTATGAGCTGGCCAAGAACGAGCTGAAGCAAGAGATCAGCAAGCTCG |
| | | AGACACAGGGCTTCAGAGGCGAGGAACTGGACTGGAAGGTGGACACCCTG |
| | | ATCAAGACCAAGGCCAAGACCGAGGGCTTCAACTACTGGCAGAAGTACGG |
| | | CAAGGCCCCTTGCGCCAGAACCGTGGAAAGATGGCTGAAGCCCCTGGAAG |
| | | AGAAGAAGCACAAGAGCCGGACCAGCAGATCTCCTGGCTGGCACGGATCT |
| | | GAGCACGTGATCAAAACCCGGGACGACCAAGAGATCTCCATCAAGTACAG |
| | | CAATCAAGTGTGGCAGATCGACCACACCAAGGCCGATCTGCTGCTGGTGG |
| | | ATGAGGACGGCGAGGAAATTGGCAGACCTCAGCTGACCACCGTGATCGAC |
| | | TGCTACAGCAGATGCATCGTGGGCCTGAGACTGGGCTTTGCCGCACCATC |
| | | TTCTCAGGTGGTGGCTCTGGCCCTGAGAAACGCCATCATGCCCAAGAGAT |
| | | ACGGCAGCGAGTACGAGCTGAGGTGCAAGTGGAGTGCCTACGGCGTGCCC |
| | | AGATACGTGTACACAGATGGCGGCAAGGACTTCCGGTCCAAGCACCTGGT |
| | | GGAATGGATCGCCAACGAGCTGGATTTCGAGCCCATCCTGAGAAGCCAGC |
| | | CTTCTGACGGCGGAATCGTGGAAAGGCCCTTCAGAACAATGAGCGGCCTG |
| | | CTGTCTGAGATGCCTGGCTACACAGGCAGCAGCGTGAAGGATAGACCTGA |
| | | GGGCGCCGAGAAAAAGGCCTGCATCTCTCTGCCTGAGCTGGAAAAGCTGA |
| | | TCGTGGGCTACATCGTGGACAGCTACAACCAGAAGCCAGACGCCAGATCA |
| | | CAGGCCAATCCTTTCACACCCAAGCAGAGCCGGATCGAGAGATGGGAGAA |
| | | GGGCCTGCAGATGCCTCCTACACTGCTGAACGACAGAGAGCTGGACATCT |
| | | GCCTGATGAAGGCCGCCGAGAGAGTGGTGTACGACAACGGCTACCTGAAC |
| | | TTCAGCGGCCTGAGATACAGGGGCGAGAATCTGGGAGCCTACGCCGGCGA |
| | | GAAAGTGATCCTGAGATTCGACCCCAGAGACATCACAATGGTGCTGGTGT |
| | | ACGGCCGGACCAACAACAAAGAGATCTTTCTGGCCAGGGCCTATGCCGTG |
| | | GGACTCGAAGCAGAGAGGCTGAGCATCGAGGAAGTGAAGTACGCCCGGAA |
| | | GAAGGCCGAGAATAGCGGCAAGGGCATCAACAATATCGCCATCCTCGAAG |
| | | AGGCTATCCGGCGGAGAAACTTCCTGGACAAGAAGAAAAACAAGACCAAA |
| | | GCCGAGCGGAGGCGGAGCGAGGAAAAGAGAGTTGAGCAGATCCCTCAGGT |
| | | GCTGAAGGACAAGAAACCCGAACAGGTGGAAAGCTTCAACAGCCAGCCTG |
| | | AGGCCGACGAGTCCATCGAGAAGCTGGATCTGAAGTCCCTGCGGGAAGAA |
| | | CTGGGCCTGTAA |
| | | (SEQ ID NO: 48) |
| | TnsC | ATGACCAACGAGGAAATCCAGCAAGAGATCGAGCGGCTGAGACAGCCCGA |
| | | CATCCTGAACATCGAGCAAGTGAAGAGATTCGGCGCCTGGCTGGACGAGC |
| | | GGAGAAAGCTGAGAAAACCTGGCAGAGCCGTGGGCGATTCTGGCCTGGGA |
| | | AAAACAACCGCCAGCCTGTTCTACACCTACCAGAACCGGGCCGTGAAGAT |
| | | CCCCAATCAGAACCCTGTGGTGCCCGTGCTGTACGTGGAACTGACAGGCA |
| | | GCAGCTGTAGCCCCAGCCTGCTGTTCAAGACCATCATCGAGACACTGAAG |
| | | TTCAAGGCCAAAGGCGGCAACGAGACACAGCTGAGAGAGAGAGCCTGGTA |
| | | CTTCATCAAGCAGTGCAAGGTGGAAGTGCTGATCATCGACGAGGCCCACC |
| | | GGCTGCAGTTTAAGACACTGGCTGATGTGCGGGACCTGTTCGACAAAGTG |
| | | AAGATCGTGCCTGTGCTCGTGGGCACCAGCAGCAGACTGGATACCCTGAT |
| | | CAGCAAGGACGAACAGGTGGCCGGCAGATTCGCCAGCTACTTCAGCTTCG |
| | | AGAAGCTGTCCGGCGCCAATTTCATCAAGATCCTGAAGATCTGGGAGCAG |
| | | CAGATCCTGAGGCTGCCCGAGCCTTCTAATCTGGCCGACAGCCAAGAGAT |
| | | CATCACCATCCTGCAAGAGAAAACCAGCGGCCAGATCCGGCTGCTGGACC |
| | | AGATTCTGAGAGATGCCGCCGTGAAGGCCCTGGAATCTGGCGTGAACAAG |
| | | ATCGACAAGAGCCTGCTGGACAGCATCGAGGGCGATTATAGCCTCGTGGG |
| | | CTCCTGA |
| | | (SEQ ID NO: 49) |
| | TniQ | ATGTGCAACGAGATCTACAACTTCGAGGCCTGGATCAACATCGTGGAACC |
| | | CTTTCCAGGCGAGAGCATCAGCCACTTTCTGGGCAGATTCGAGCGGGCCA |
| | | ATCTGCTGACAGGCTACCAGATCGGAAAAGAGGCCGGCGTTGGAGCCATC |
| | | GTGACCAGATGGAAGAAGCTGTACCTGAATCCGTTTCCGACACAGCAAGA |
| | | GCTGGAAGCCCTGGCCAACTTCGTGGAAGTGGCCACCGAGAAGCTGAAAG |
| | | AAATGCTGCCCGTGAAGGGCATGACCATGAAGCCCAGACCTATCAAGCTG |
| | | TGCGCCGCCTGTTATGCCGAGCAGCCCTATCACAGAATCGAGTGGCAGTA |
| | | CAAGGACAAGCTGAAGTGCGACCGGCACAACCTGAGACTGCTGACCAAGT |
| | | GCACCAACTGTCAGACCCCTTTTCCTATTCCTGCCGACTGGGTGGAAGGC |
| | | AAGTGCAGCCACTGCAGCCTGAGATTTGCCACCATGGCCAAGCGGCAGAA |
| | | ACCCAGATAA |
| | | (SEQ ID NO: 50) |
| | LE | AAAAAGCATTGAGAGACCCTTTCACAAAGGCAATCATCCTCGCTCAATAA |
| | | TTACAATTCTCAACACTTAAGTCCAACTTGCCTGGAGTAAAGCCATCAAT |
| | | CTGTCAACGCGGACAAATAATTTGGCAATCGACACTGTAGAGCGACAAAT |
| | | TATTTGACCACATCGACAAATTATTTGTCACATTAATACATTAGTGAACA |
| | | ATCCTTATATACCAATACTTTTCACCATTTGATAGCTAAGAAAGCTGTTT |
| | | AGGTTGTCTGCCACAAATTATGTGTCATTTTTTTAGTAATCCGACACATT |
| | | AAGCGTCATTTGTTAATTTGGCGAAAAATTAGCTGTCAATTCTTCACAGC |
| | | TTTATAGTAGTATAAATGTACGTTAGTTTTTCACAAAAAAATTACATCTA |
| | | TGAGCGCTTTAGATGTAGATGACGATTTTGAACTGGAAGAAGATACCTAC |
| | | CTATTAGGTGATGAAGATGCAGACCTGTTCGATGACTCATCGGATGTAAT |
| | | (SEQ ID NO: 51) |
| | RE | AGTTTTAACAACCATCCCAATTAGGGCTGGGTTGAAAGCAAATTTTTGTC |
| | | GTTACTATGTGAAATATTTGTTTGAATTAGGAGGGTTGAAAGGCGCACTT |
| | | CGTTCGGGATAATTCCGACACTGTGTATAGTAAAATCTATGCGACTTCAA |
| | | TTAGGAAAATCATCTCTGGAAAGAGATTGACAAATAATTTGTCGTTTTGG |
| | | TTTTTTGACAAATAATATGTCGCCACGGACAGATAATTTGTCGCTTTACA |
| | | ACAATAATCGGGATGACTGGATTCGAACCAGCGGCCCCTTCGTCCCGAAC |
| | | GAAGTGCGCTACCAAGCTGCGCTACATCCCGGCATAATAAGCCCATTGTT |
| | | TAAATATGATATCATTAATAATGGTAAATGTACACCCATGCTGATTTTTA |
| | | TTTGGGAAATTGCGATCGCCTGGGTAGAATAGTCGAATCACCTGAAAGTT |
| | | CTGATTTTCAAAACATGGTGACTAACAGTAATCATCAGTGAGATAATTTT |
| | | (SEQ ID NO: 52) |
| AP018178/ | TnsB | ATGCTGGACGAGCACAGCAACGGCGATCAAGAGCCCGAGAACGACGAGAT |
| Calothrix | | CGTGACAGAGCTGAGCGCCGACAACCGGCATCTGCTGGAAATGATCCAGC |
| sp. NIES- | | AGCTCCTGGAACCTTGCGACCGGATCACATACGGCGAGAGACAGAGAGAG |
| 2100/T37 | | GTGGCCGCCAAGCTGGGAAAGTCTGTGCGGACAGTTCGGCGGCTGGTCAA |
| | | GAAGTGGGAAGAAGAAGGACTGGCCGCTCTGCAGACAACCGCCAGAGCCG |
| | | ATAAGGGCAAGCACAGAATCGACACCGACTGGCAGCAGTTCATCATCAAG |
| | | ACCTACAAAGAGGGCAACAAGGGCAGCAAGCGGATCACCCCTCAGCAGGT |
| | | TGCCATTAGAGTGCAGGCCAGAGCTGCCGAGCTGGGCCAGAAGAAGTACC |
| | | CCAGCTACCGGACCGTGTACAGAGTGCTGCAGCCCATCATCGAGCAGCAA |
| | | GAGCAGAAGGCCGGCGTCAGATCTAGAGGCTGGCACGGCTCTAGACTGAG |
| | | CGTGAAAACCAGAGATGGCAAGGACCTGAGCGTGGAATACTCCAACCACG |
| | | TGTGGCAGTGCGACCACACCAGAGTGGATCTGCTGCTGGTGGATCAGCAC |
| | | GGCGAACTGCTTGGTAGACCTTGGCTGACCACCGTGGTGGACACCTACTC |
| | | CAGATGCATCATGGGCATCAACCTGGGCTTCGACGCCCCTAGTTCTCAGG |
| | | TTGTGGCCCTGGCCGTTAGACACGCCATTCTGCCTAAGCAGTACGGCAGC |
| | | GAGTACGGCCTGCACGAGGAATGGGGCACATATGGCAAGCCCGAGCACTT |
| | | CTACACCGACGGCGGCAAGGACTTCAGAAGCAACCATCTGCAGCAGATTG |
| | | GCGTGCAGCTGGGCTTTGTGTGCCACCTGAGAGACAGGCCATCTGAAGGC |
| | | GGCATCGTGGAAAGACCCTTCGGAACCTTCAACACCGATTTCTTCAGCAC |
| | | CCTGCCTGGCTACACCGGCAGCAATGTGCAAGAAAGACCTGAGCAGGCCG |
| | | AGAAAGAGGCCTGTCTGACCCTGAGAGAGCTGGAACACAGATTCGTGCGG |
| | | TACATCGTGGACAAGTACAACCAGCGGCCTGACGCCAGACTGGGCGATCA |
| | | GACAAGATATCAGAGATGGGAGGCCGGACTGATCGCTAGCCCCAACGTGA |
| | | TCAGCGAGGAAGAACTGCGGATCTGCCTGATGAAGCAGACCCGGCGGAGC |
| | | ATCTACAGAGGCGGCTATCTGCAGTTCGAGAACCTGACCTACCGGGGCGA |
| | | AAATCTGGCCGGATATGCTGGCGAGAGCGTGGTGCTGAGATACGACCCCA |
| | | AGGACATCACCACACTGCTGGTGTACAGACACAGCGGCAACAAAGAAGAG |
| | | TTCCTGGCCAGAGCCTTCGCTCAGGACCTGGAAACAGAACAGCTGAGCCT |
| | | GGATGAGGCCAAGGCCAGCTCCAGAAAGATTAGACAGGCCGGCAAGATGA |
| | | TCAGCAACCGGTCCATGCTGGCCGAAGTGCGGGACAGAGAAACCTTCGTG |
| | | ACCCAGAAAAAGACCAAGAAAGAGCGGCAGAAAGCCGAACAGGCCGTGGT |
| | | CGAGAAGGCCAAGAAACCCGTTCCTCTGGAACCAGAGAAAGAAATCGAGG |
| | | TGGCCAGCGTGGACAGCGAGAGCAAGTATCAGATGCCCGAGGTGTTCGAC |
| | | TACGAGGAAATGCGGGAAGAGTACGGCTGGTGA |
| | | (SEQ ID NO: 53) |
| | TnsC | ATGACAAGCAAGCAGGCCCAGGCCATTGCTCAGCAGCTGGGAGACATCCC |
| | | CGTGAACGATGAGAAGCTGCAGGCCGAGATCCAGCGGCTGAACAGAAAGA |
| | | GCTTCATCCCTCTGGAACAAGTGAAGATGCTGCACGACTGGCTGGACGGC |
| | | AAGAGACAGAGCAGACAGTCTGGCAGAGTGCTGGGCGAGAGCAGAACCGG |
| | | CAAGACCATGGGCTGTGACGCCTACAGACTGCGGCACAAGCCTAAGCAAG |
| | | AGCCCGGCAAACCTCCTACAGTGCCCGTGGCCTACATCCAGATTCCTCAA |
| | | GAGTGCAGCGCCAAAGAGCTGTTCGCCGCCATCATCGAGCACCTGAAGTA |
| | | CCAGATGACCAAGGGCACCGTGGCCGAGATTCGGGAAAGAACCCTGAGAG |
| | | TGCTGAAAGGCTGCGGCGTGGAAATGCTGATCATCGACGAGGCCGACCGG |
| | | TTCAAGCCCAAGACCTTTGCTGAAGTGCGGGACATCTTCGACAAGCTGGA |
| | | AATCGCCGTGATCCTCGTGGGCACCGATAGACTGGATGCCGTGATCAAGC |
| | | GGGACGAACAGGTGTACAACCGGTTCAGAAGCTGCCACAGATTCGGCAAG |
| | | TTCAGCGGCGAGGACTTCCAGCGGACAGTGGAAATCTGGGAGAAACAGGT |
| | | GCTGAAGCTGCCTGTGGCCAGCAACCTGAGCAGCAAGACAATGCTGAAAA |
| | | CCCTGGGCGAAACCACCGGCGGCTATATCGGACTGCTGGACATGATCCTG |
| | | AGAGAGAGCGCCATTCGGGCCCTGAAGAAAGGCCTGGCCAAGATCGACCT |
| | | GGAAACCCTGAAAGAAGTGGCCGCCGAGTACAAGTGA |
| | | (SEQ ID NO: 54) |
| | TniQ | ATGGAAGTGCCCGAGATCCAGAGCTGGCTGTTCCAGGTGGAACCTCTGGA |
| | | AGGCGAGAGCCTGTCTCACTTCCTGGGCAGATTCAGACGGACCAACGATC |
| | | TGACAGCCACCGGCCTGGGAAAAGCCGCTGGACTTGGCGGAGTGATTGCC |
| | | AGATGGGAGAAGTTCCGGTTCAACCCTCCACCTAGCCGGCAGCAACTGGA |
| | | AGCCCTGGCTAAAGTTGTGGGCGTGAACGCCGATAGACTGGCCCAAATGC |
| | | TTCCTCCTGCTGGCGTGGGCATGAAGATGGAACCCATCAGACTGTGCGCC |
| | | GCCTGCTACGTGGAAAGCCCTTGTCACAAGATCGAGTGGCAGCTGAAAGT |
| | | GACCCAGGGCTGCGCCAGACACAATCTGTCTCTGCTGAGCGAGTGCCCCA |
| | | ATTGCGGCGCCAGATTCAAAGTGCCTGCTGTGTGGGTGGACGGCTGGTGC |
| | | CAGAGATGCTTTCTGACCTTCGCCGACATGGTCAAGCACCAGAAGTCCAT |
| | | CGACTACTGA |
| | | (SEQ ID NO: 55) |
| | LE | CATTGAGAGACCCTTTCACAAAGGCAATCATCCTCGCTCAATAATTACAA |
| | | TTCTCAACACTTAAGTCCAACTTGCCTGGAGTAAAGCCATCAATCTGTCA |
| | | ACGCGGACAAATAATTTGGCAATCGACACTGTAGAGCGACAAATTATTTG |
| | | ACCACATCGACAAATTATTTGTCACATTAATACATTAGTGAACAATCCTT |
| | | ATATACCAATACTTTTCACCATTTGATAGCTAAGAAAGCTGTTTAGGTTG |
| | | TCTGCCACAAATTATGTGTCATTTTTTTAGTAATCCGACACATTAAGCGT |
| | | CATTTGTTAATTTGGCGAAAAATTAGCTGTCAATTCTTCACAGCTTTATA |
| | | GTAGTATAAATGTACGTTAGTTTTTCACAAAAAAATTACATCTATGAGCG |
| | | CTTTAGATGTAGATGACGATTTTGAACTGGAAGAAGATACCTACCTATTA |
| | | GGTGATGAAGATGCAGACCTGTTCGATGACTCATCGGATGTAATACTTGT |
| | | (SEQ ID NO: 56) |
| | RE | AGTTTTAACAACCATCCCAATTAGGGCTGGGTTGAAAGCAAATTTTTGTC |
| | | GTTACTATGTGAAATATTTGTTTGAATTAGGAGGGTTGAAAGGCGCACTT |
| | | CGTTCGGGATAATTCCGACACTGTGTATAGTAAAATCTATGCGACTTCAA |
| | | TTAGGAAAATCATCTCTGGAAAGAGATTGACAAATAATTTGTCGTTTTGG |
| | | TTTTTTGACAAATAATATGTCGCCACGGACAGATAATTTGTCGCTTTACA |
| | | ACAATAATCGGGATGACTGGATTCGAACCAGCGGCCCCTTCGTCCCGAAC |
| | | GAAGTGCGCTACCAAGCTGCGCTACATCCCGGCATAATAAGCCCATTGTT |
| | | TAAATATGATATCATTAATAATGGTAAATGTACACCCATGCTGATTTTTA |
| | | TTTGGGAAATTGCGATCGCCTGGGTAGAATAGTCGAATCACCTGAAAGTT |
| | | CTGATTTTCAAAACATGGTGACTAACAGTAATCATCAGTGAGATAATTTT |
| | | (SEQ ID NO: 57) |
| AP018194/ | TnsB | ATGGGCGAGACACTGAACAGCAACGAGGTGGACGAGAGCCTGGTGCTGTA |
| Scytonema | | CGATGGCTCTGACGAAGTGGATGAGATCAGCGAGAGCGAGGACACCAAGC |
| sp. HK-05/ | | AGAGCAACGTGATCGTGACCGAGCTGAGCGAAGAGGCCAAGCTGAGAATG |
| T38 | | CAGGTCCTGCAGAGCCTGATCGAGCCCTGCGACAGAAAGACCTACGGCAT |
| | | CAAGCTGAAGCAGGCCGCCGAGAAGCTGGGAAAGACCGTCAGAACAGTGC |
| | | AGCGGCTGGTCAAGAAGTACCAAGAGCAGGGACTGAGCGGCGTGACAGAG |
| | | GTGGAAAGATCTGACAAAGGCGGCTACCGGATCGACGACGACTGGCAGGA |
| | | CTTCATCGTGAAAACCTACAAAGAGGGCAACAAAGGCGGACGGAAGATGA |
| | | CCCCTGCTCAGGTGGCCATCAGAGTGCAAGTTCGCGCTGGACAGCTGGGC |
| | | CTCGAGAAGTACCCTTGTCACATGACCGTGTACCGGGTGCTGAACCCCAT |
| | | CATCGAGCGGAAAGAACAGAAACAGAAAGTGCGGAACATCGGCTGGCGGG |
| | | GCAGCAGAGTTTCTCACCAGACAAGAGATGGCCAGACACTGGACGTGCAC |
| | | CACAGCAATCACGTGTGGCAGTGCGACCACACCAAGCTGGATGTGATGCT |
| | | GGTGGACCAGTACGGCGAAACCCTGGCTAGACCTTGGCTGACCAAGATCA |
| | | CCGACAGCTACAGCCGGTGCATCATGGGCATCCACCTGGGCTTTGATGCC |
| | | CCTAGCTCTCTGGTGGTGGCCCTGGCTATGAGACACGCCATGCTGAGGAA |
| | | GCAGTACAGCAGCGAGTACAAGCTGCACTGCGAGTGGGGCACATATGGCG |
| | | TGCCCGAGAACCTGTTTACCGACGGCGGCAAGGACTTCAGAAGCGAGCAC |
| | | CTGAAGCAGATCGGCTTCCAGCTGGGATTCGAGTGTCACCTGAGAGACAG |
| | | ACCTCCAGAAGGCGGCATCGAGGAAAGAGGCTTCGGAACAATCAATACCA |
| | | GCTTCCTGAGCGGCTTCTACGGCTACCTGGACAGCAACGTGCAGAAGAGG |
| | | CCTGAGGGCGCCGAAGAGGAAGCCTGTATCACACTGAGAGAGCTGCATCT |
| | | GCTGATCGTGCGGTACATCGTGGACAACTACAACCAGAGAATCGACGCCA |
| | | GAAGCGGCAACCAGACCAGATTCCAGAGATGGGAAGCCGGCCTTCCTGCT |
| | | CTGCCCAACCTGGTCAATGAGCGCGAGCTGGACATCTGCCTGATGAAGAA |
| | | AACCCGGCGGAGCATCTACAAAGGCGGATACGTGTCCTTCGAGAACATCA |
| | | TGTACCGGGGCGACTACCTGTCTGCCTATGCCGGCGAATCTGTGCTGCTG |
| | | AGATACGACCCCAGAGACATCAGCACCGTGTTCGTGTACAGACAGGACAG |
| | | CGGCAAAGAGGTCCTGCTGTCTCAGGCCCACGCCATCGATCTGGAAACCG |
| | | AGCAGATCAGCCTGGAAGAGACAAAGGCCGCCAGCAGAAAGATCCGGAAT |
| | | GCCGGCAAGCAGCTGAGCAACAAGTCTATCCTGGCCGAGGTGCAGGACCG |
| | | GGACACCTTTATCAAGCAGAAGAAGAAGTCCCACAAGCAGCGGAAGAAAG |
| | | AGGAACAGGCCCAGGTCCACAGCGTGAAGTCTTTCCAGACCAAAGAACCC |
| | | GTGGAAACCGTGGAAGAGATCCCTCAGCCTCAGAAAAGACGGCCCAGAGT |
| | | GTTCGACTACGAGCAGCTGCGGAAGGACTACGACGATTGA |
| | | (SEQ ID NO: 58) |
| | TnsC | ATGGCCGAGGACTACCTGAGAAAATGGGTGCAGAACCTGTGGGGCGACGA |
| | | CCCCATTCCTGAAGAACTGCTGCCCATCATCGAGCGGCTGATCACACCTA |
| | | GCGTGGTGGAACTGGAACACATCCAGAAGATCCACGACTGGCTGGACAGC |
| | | CTGAGACTGAGCAAGCAGTGCGGCAGAATTGTGGCCCCTCCTAGAGCCGG |
| | | CAAGAGCGTGACATGTGACGTGTACAAGCTGCTGAACAAGCCCCAGAAGA |
| | | GAACCGGCAAGCGGGACATTGTGCCCGTGCTGTATATGCAGGCTCCCGGC |
| | | GATTGCTCTGCTGGCGAACTGCTGACACTGATCCTGGAAAGCCTGAAGTA |
| | | CGACGCCACCAGCGGCAAGCTGACCGACCTGAGAAGAAGAGTGCTGCGGC |
| | | TGCTGAAAGAAAGCAGAGTGGAAATGCTCGTGATCGACGAGGCCAACTTC |
| | | CTGAAGCTGAACACCTTCAGCGAGATCGCCCGGATCTACGACCTGCTGAA |
| | | GATCAGCATCGTGCTCGTGGGCACCGACGGCCTGGACAACCTGATTAAGA |
| | | AAGAGCGGTACATCCACGACCGGTTCATCGAGTGCTATAAGCTGCCCCTG |
| | | GTGTCCGAGAACAAGTTCCCCGAGTTCGTGCAGATCTGGGAAGATGAGGT |
| | | GCTGTGCCTGCCTGTGCCTAGCAATCTGATCAAGAGCGAGACACTGAAGC |
| | | CCCTGTACCAGAAAACCTCCGGCAAGATCGGCCTGGTGGACAGAGTTCTG |
| | | AGAAGGGCCGCCATCCTGAGCCTGAGAAAGGGCCTGAAGAATATCGACAA |
| | | GGCCACACTGGACGAGGTGCTCGAGTGGTTCGAATGA |
| | | (SEQ ID NO: 59) |
| | TniQ | ATGGAAATCCCTGCCGAGCAGCCCAGATTCTTCCAGGTGGAACCTCTGGA |
| | | AGGCGAGAGCCTGTCTCACTTCCTGGGCAGATTCAGAAGAGAGAACTACC |
| | | TGACCGCCACACAGCTGGGCAAGCTGACAGGCATTGGAGCCGTGATCAGC |
| | | AGATGGGAGAAGTTCTACCTGAATCCGTTTCCGACACCTCAAGAGCTGGA |
| | | AGCCCTGGCCGCTGTGGTGGAAGTGAAAGTGGACCGGCTGATCGAGATGC |
| | | TGCCTCCTAAGGGCGTGACCATGAAGCCCAGACCTATCAGACTGTGCGGC |
| | | GCCTGCTACCAAGAGTCCCCTTGTCACAGAGTGGAATGGCAGTTCAAGGA |
| | | CAAGCTGAAGTGCGTGTCCGAGGCTCACCCCAAGGATGCCAGACATCAAC |
| | | TGGGCCTGCTGACAAAGTGCACCAACTGCGAGACACCCTTTCCTATACCT |
| | | GCCGACTGGGTGCAGGGCGAGTGCCCTCACTGTTTTCTGCCCTTCGCCAA |
| | | GATGGCCAGACGGCAGAAGAGATACTGA |
| | | (SEQ ID NO: 60) |
| | LE | TTAATATAATAATTATTCAAATCAATAAACACATCACAGCCTTCTAACTT |
| | | CAAAAACTTCCAAATATCCCCCGTTGTTACTGCACCATAAATAGTTGTCG |
| | | AATAACTAATTAAATGTCGTCTTAACAAATTAATGTCGCTCAAAACGTAA |
| | | AGGCTATAATCGTTACTAAGCAAGGATTATAGCCTTTTTGATTTCTATTT |
| | | AGCATTCCTAAATATTTAACTAATTAAACGTCGTAATTTGTAAATATAAC |
| | | AAAATAAGTGTCGTTTTTTCAAAAAATCTCTTTCCAAAGTTTTTAACGGC |
| | | TCATAACAAAATAAGTGTCGTCTTTTGGAAGTGAGTAAAAAATCTAAAAT |
| | | TACGTGTCGCTTTTTGGAATAAAGTAGTAGTATATTTACTAGGTAATAGT |
| | | AATTATGTACGAATAAGGTGTTACGCATTTAATTTTTTTGCCCAAAAGCC |
| | | TTGCAGCAAGGACTTTAGGCTGCAAAATATTACATTTAGATGCGCGTCAG |
| | | CTTACAAACATAGTTGTACTCAAGTCTTCTTATTTCTCTCTACTTGCAAA |
| | | GTCATTCCTCATATTGCGTTAAAGGTTGATGTGAGTTGAGGCTGTATACT |
| | | (SEQTDNO: 61) |
| | RE | GGTTCAACGACCATCCCGGCTAGGGGTGGGTTTAAACGACGGGAAGAGCA |
| | | AATCTGTTACTGCTGTATGCAGCAAGGTTTCAACAACTATCCCGGGTCAA |
| | | GTTTGCTTGTGAGGGTTGAAAGGAATGTCACCTTCCCAATACTAGAAGAG |
| | | TGTCAAAAGCTATGCTGGCTAATGGAAGGTTGAAATTAATCGCTATTTTT |
| | | TTGCAAAGAAAAGATTCTACCAGTTATAAAAAAGCAAGAGTGACAAACAA |
| | | TTAGTCGTTCAAACAAATGACAAATTGTTTGTCGCTCTAAAGTATCCTAG |
| | | ATTACTTGACTATACGAGTTTATTTTTTAGGGATTAAGCTCGGGGAAAAG |
| | | TTTGTGATCTACTGACATTCAAGTAACACTGACAAATAATTTGTCACTGT |
| | | ACAATACTCAATAAGAGTCGGCTACATTAAATGACTATAAGACAAATAAT |
| | | TTGTCGCTTTACCACTTTTGACAAATAATTTGTCGCCACGGTCAAATAAT |
| | | TTGTCGCTCTACATTTGAAAGCGGGCGATGGGACTCGAACCCACGACGTT |
| | | CACCTTGGGAAGGTGACATTCTACCACTGAATTACACCCGCAAATGGATG |
| | | TTAGCCT |
| | | (SEQ ID NO: 62) |
| AP018216/ | TnsB | ATGGTCATCCAGACACTGCTGGAACCCTGCGACAGAACCACCTACGGCCA |
| Trichormus | | GAAGCTGAAAGAGGCCGCCGATACACTGGGAGTGACAGTGCGAACAGTGC |
| variabilis | | AGCGGCTGGTCAAGAAGTGGGAAGAGGACGGACTCGTGGGCTTTATCCAG |
| NIES-23/ | | ACCGGCAGAGCCGATAAGGGCAAGCACAGAATCGGCGAGTTCTGGGAGAA |
| T40 | | CTTCATCATCAAGACCTACAAAGAGGGCAACAAGGGCAGCAAGCGGATGA |
| | | CCCCTAAACAGGTGGCACTGAGAGTGCAGGCCAAGGCCAGAGAGCTGGGC |
| | | GATAGCAAGCCTCCTAACTACCGGACCGTGCTGAGAGTTCTGGCCCCTAT |
| | | CCTGGAACAGAAAGAAAAGACCAAGAGCATCAGAAGCCCCGGCTGGCGGG |
| | | GAACAACACTGAGCGTGAAAACCAGAGAAGGCCAGGACCTGAGCGTGGAC |
| | | TACAGCAATCACGTGTGGCAGTGCGACCACACCAGAGTGGATGTGCTGCT |
| | | GGTGGATCAGCACGGCGAGCTGCTTTCTAGACCTTGGCTGACCACCGTGA |
| | | TCGACACCTACAGCAGATGCATCATGGGCATCAACCTGGGCTTCGACGCC |
| | | CCTTCTTCTGTGGTGGTTGCTCTGGCCCTGAGACACGCCATCCTGCCTAA |
| | | GAAATACGGCGCCGAGTACAAGCTGCACTGCGAGTGGGGCACATACGGCA |
| | | AGCCTGAGCACTTCTACACCGACGGCGGCAAGGACTTCAGATCCAACCAC |
| | | CTGTCTCAGATCGGCGCTCAGCTGGGCTTTGTGTGTCACCTGAGAGACAG |
| | | ACCTAGCGAAGGCGGCATCGTGGAAAGACCCTTCAAGACCCTGAACGACC |
| | | AGCTGTTCAGCACCCTGCCTGGCTACACAGGCAGCAACGTGCAAGAGCGG |
| | | CTGGAAGATGCCGAGAAGGATGCCAAGCTGACCCTGAGAGAACTGGAACA |
| | | GCTGCTTGTGCGGTACATCGTGGACCGGTACAACCAGAGCATCGACGCCA |
| | | GAATGGGCGATCAGACCAGATTCGGAAGATGGGAGGCCGGACTGCCTTCT |
| | | GTGCCTGTGCCTATCGAGGAACGCGACCTGGACATCTGCCTGATGAAGCA |
| | | GAGCCGCAGAACCGTTCAGAGAGGCGGCTGTCTGCAGTTCCAGAACGTGA |
| | | TGTACCGGGGCGAGTACCTGGCTGGATATGCCGGCGAGACAGTGAACCTG |
| | | AGATACGACCCCAGAGACATCACCACCGTGCTGGTGTACCGGCAAGAGAA |
| | | GTCCCAAGAGGTGTTCCTGACCAGAACACACGCCCAGGGACTCGAGACAG |
| | | AACAGCTGAGCCTGGATGAAGCCGAGGCTGCCTCTCGGAGACTGAGAAAT |
| | | GCCGGCAAGACCGTGTCCAATCAGGCCCTGCTGCAAGAAGTGCTGGAACG |
| | | GGACGCTATGGTGGCCAACAAGAAGTCCCGGAAAGAGCGGCAGAAGCTCG |
| | | AGCAGGCCATTCTGAGATCTGCCGCCGTGAACGAGAGCAAGACAGAGTCT |
| | | CTGGCCAGCAGCGTGATGGAAGCCGAAGAGGTGGAAAGCACCACCGAGGT |
| | | GCAGAGCAGCTCTAGCGAACTGGAAGTGTGGGACTACGAGCAGCTGCGGG |
| | | AAGAGTACGGCTTCTGA |
| | | (SEQ ID NO: 63) |
| | TnsC | ATGACCGACGCCAAGGCCATTGCTCAGCAGCTCGGCGGAGTGAAGCCTGA |
| | | CGAAGAATGGCTGCAGGCCGAGATCGCCAGACTGAAGGGCAAGTCTATCG |
| | | TGCCCCTGCAGCAAGTGCGGAGCCTGCATGATTGGCTGGACGGCAAGAGA |
| | | AAGGCCCGGCAGTTCTGTAGAGTCGTGGGCGAGTCTAGAACCGGCAAGAC |
| | | CGTGGCCTGTGACGCCTACAGATACCGGCAGAAAGTGCAGGCTGAAGTGG |
| | | GCAGACCTCCAATCGTGCCCGTGGTGTATATCCAGCCTCCTCAGAAGTGC |
| | | GGCGCCAAGGACCTGTTCCAAGAGATCATCGAGTACCTGAAGTTCAAGGC |
| | | CACCAAGGGCACCGTGTCCGACTTCAGAGGCAGAACCATGGAAGTGCTGA |
| | | AAGGCTGCGGCGTGGAAATGATCATCGTGGACGAGGCCGATAGACTGAAG |
| | | CCCGAGACATTTGCCGAAGTGCGGGACATCTACGACAAGCTGGGAATCGC |
| | | CGTGGTGCTCGTGGGAACCGACAGACTGGAAGCCGTGATCAAGCGGGACG |
| | | AACAGGTGTACAACCGGTTCAGAGCCTGCCACAGATTCGGCAAGCTGAGC |
| | | GGCAAGGACTTCCAGGATACAGTGCAGGCCTGGGAAGATAAGATCCTGAA |
| | | GCTGCCCCTGCCTAGCAACCTGATCAGCAAGGACATGCTGCGGATCCTGA |
| | | CCAGCGCCACAGAGGGCTATATCGGCAGACTGGACGAGATCCTGAGAGAG |
| | | GCCGCCATCAGAAGCCTGTCCAGAGGCCTGAAGAAAATCGACAAGCCCGT |
| | | GCTGCAAGAGGTGGCCCAAGAGTACAAGTGA |
| | | (SEQ ID NO: 64) |
| | TniQ | ATGGCTGCCCCTGATGTGAAGCCCTGGCTGTTCATCATCCAGCCTTACGA |
| | | GGGCGAGAGCCTGAGCCACTTCCTGGGCAGATTCAGAAGGGCCAATCACC |
| | | TGTCTGCCAGCGGCCTGGGAAAACTGGCTGGAATTGGAGCCGTGGTGGCC |
| | | AGATGGGAGAGATTCCACTTCAACCCCAGACCTAGCCAGAAAGAGCTGGA |
| | | AGCCATTGCCAGCCTGGTGGAAGTGGACGCCGATAGACTGGCTCAGATGC |
| | | TGCCTCCACTCGGCGTGGGAATGCAGCACGAGCCTATTAGACTGTGCGGC |
| | | GCCTGTTATGCCGAGGCTCCTTGTCACAGAATCGAGTGGCAGTACAAGAG |
| | | CGTGTGGAAGTGCGACCGGCACGAGCTGAAGATCCTGGCCAAGTGTCCCA |
| | | ATTGCGAGGCCCCTTTCAAGATCCCCGCTCTGTGGGAAGATAAGTGCTGC |
| | | CACAGATGCAGAACCCCTTTCGCCGAGATGACCAAGTACCAGAAGATCAC |
| | | CTGA |
| | | (SEQ ID NO: 65) |
| | LE | CTGGCATTCTTACTAATGCAGCAAACCTCACTCAGCCTGACCAAGTTGCC |
| | | TCTTTGTGCGCTTGGTTTATTCAACTTTGATGTACAGTGACTAATTATTT |
| | | GTCACTGTACACAAGATGTACAGTGACTAATTATTTGTCACTGTACACAA |
| | | GATGTACAGTGACTAATTGTTTGTCGTCGTGACAAATTAATGTCGTCGAA |
| | | TGAATCCTTGCAATACAAAGGTTTTAGCTATTTAAGAGTTATTACATTAT |
| | | TTCTCATACGTGACTAAATAAATGTCGTTTTCCGCAAAAATGACAAATTA |
| | | ACTGTCGCTTCAGTAATTACAAAAAAGGTTTTGTATATTTTCATAATGAC |
| | | AAATTGACTGTCGTTTTCTCCACGTTTAGAATAACATTATGTATTTATAA |
| | | ATTACCTTTGTTTCATGAACAAAAAATCTTATGTCTGATTTTACTGTTCA |
| | | TACCGCAGTGGATACTGCGGAAGCTTTATTACAAGACAACAACACACCTC |
| | | (SEQ ID NO: 66) |
| | RE | GTTGCAACCCTCCTTCCGGTAATACATGGTGAAAACAAATTGGATATGAA |
| | | ACTGCCTTACGTTGTCTGATGGTGTAATTAATTTCCAAGAAGTAGAGGGT |
| | | TGAAAGCAAATCCCGTCATCGGCTTGTAACTAAAGTTATTCAGGATAAGC |
| | | TACTCATAGAAGTGATTAAAAGAGCTTTTTGAATGCAAACGCTTATAATA |
| | | GGGGCTAAATATATAGAGAAACTCCATATATAAATTGTTGCTTTTCCGAA |
| | | AAATGACAATAATTTGTCACAAATATATATGGAAGCGAGTTACTAAGTTG |
| | | GATGACAATAATTTGTCACAACGACATCAATTTGTCACCGACGACAAATA |
| | | AGAGACCATTTATAAAGTAAATCTTTAGACGACTAGACGACGTAGCATAA |
| | | TACGAGTCATAACGGCATATATGGCAGCCTCACTCATTTCTGGGAGACGC |
| | | TCATAATCCTTACTGAGACGACGGTACTGGTTTAACCAGCCAAATGTTCT |
| | | (SEQ ID NO: 67) |
| AP018227/ | TnsB | ATGGGCGAAGATTACCCCAGCGACAGCCTGGAAAGCGAGACAAACGAGAT |
| Calothrix | | CGTGACCGAGCTGAGCTACGAGGAACGCAGAGTGCTGGAAGTGATCCAGG |
| parasitica | | GCCTGCTGGAACCCTGCGACAGAAAGACATACGGCGAGAAGCAGAGACAG |
| NIES-267/ | | GCCGCTGCCAAGCTGGGAAAGTCTGTGCGGACCATCAGACGGCTGGTCAA |
| T41 | | GAAGTGGGAAGAACAGGGACTTGCCGCTCTGCAGACCACCACCAGAGTGG |
| | | ATAAGGGCAGACACCGGATCGACAAGGACTGGCAGGACTTCATCATCAAG |
| | | ACCTACAAAGAGGGCAACAAGGGCAGCAAGCGGATCAGCCCTCTGCAGGT |
| | | TTCCATGAGAGTGAAAGTGCGGGCCTCTGAGCTGGGCCAGAAAGAGTACC |
| | | CTAGCTACCGGACCGTGTACAGGGTGCTGCAGCCTGTGATTGAGCAGCAA |
| | | GAGCAGAAAGCCAAAGTGCGGAGCAGAGGCTGGCGGGGATCTAGACTGCT |
| | | GGTTAAGACCAGAGAGGGCAAAGACCTGAGCGTGGAATACTCCAACCACG |
| | | TGTGGCAGTGCGATCACACCCTGGTGGATCTGCTGCTGGTGGATAGACAC |
| | | GGCGAGATTGTGGGCAGACCTTGGCTGACCACCGTGATCGATACCTACAG |
| | | CCGGTGCATCATGGGCATCAACCTGGGCTTCAATGCCCCTAGCTCTCAGG |
| | | TGGTGGCTCTGGCCCTGAGACACGCCATTATGCCCAAGCACTACAGCAGA |
| | | GAGTACGAGCTGTACGAGGAATGGGGCACCTATGGCAGCCCCGAGCACTT |
| | | TTACACAGACGGCGGCAAGGACTTCAGAAGCAACCATCTGCAGCAGATTG |
| | | GCGTGCAGCTGGGCTTCGCCTGTCACCTGAGAAACAGACCTAGCGAAGGC |
| | | GGCATCGTGGAAAGACCCTTCGGCACCTTCAACACCGAGCTGTTCTCTAC |
| | | CCTGCCTGGCTACACCGGCAGCAATGTGCAGCAGAGGCCTAAAGAGGCCG |
| | | AGAAAGAGGCCTGCGTCACCCTGAGAGAGCTGGAAAAGCTGCTCGTGCGG |
| | | TTCATCGTGGACAAGTACAACCAGAGCATCGACGCCAGAAGCGGCGACCA |
| | | GACCAGATTCCAGAGATGGGAGGCCGGACTGATCGCCGTGCCTAACATGA |
| | | TCAGCGAGCGCGACCTGGACATCTGCCTGATGAAGCAGACCAGACGGACC |
| | | ATCTACCGCAGCGGCTACATCCAGTTCGAGAACCTGACCTACAAGGGCGA |
| | | GAACCTCGGAGGATACGCCGGCGAAAATGTGGTGCTGAGATACGACCCCA |
| | | GAGACATCACCACCGTGTGGGTGTACAGACGGAAGGGCTCCAAAGAAGAG |
| | | TTCCTGGCCAGAGCTTTCGCCCAGGACCTGGAAACCGAACAGCTGTCTCT |
| | | GGATGAGGCCAAGGCCAGCTCCAGAAAAGTTCGCGAGGCCGGCAAGACCG |
| | | TGTCCAACAGATCTATCCTGGCCGAAGTGCGGGACAGACAGATCTTCACC |
| | | ACACAGAAAAAGACCAAGAAAGAGCGGCGCAAGACCGAGCAGGCCGAACT |
| | | GATTCAGGCCAAGCAGCCACTGCCTGTGGAACTGGAAGTGGAAGAAGAGG |
| | | TGGAAACCGTCAGCACCGGCTCCGAGCCTGAGTATCAGATGCCTGAGGCC |
| | | TTCGACTACGAGCAGATGAGAGAGGACTACGGCTTCTGA |
| | | (SEQ ID NO: 68) |
| | TnsC | ATGACCAATCAGCAGGCACAGGCAGTTGCACAGCAGCTGGGTGCAATTCC |
| | | GACCAATAATGAAAAACAGCAGGCAGATATTCAGCGTCTGCAGGGTAAAA |
| | | GCTTTGTTCCGCTGGAAAAAGTTAAAGTGCTGCATAATTGGCTGGAAGGT |
| | | AAACGTCAGAGCCGTCTGAGCGGTCGTGTTGTTGGTGAAAGCCGTACCGG |
| | | TAAAACCATGGGTTGTGATGCATATCGTCTGCGTCATAAACCGATTCAGA |
| | | AACATGGTAAACCGCCTACCGTTCCGGTTGTTTATATTCAGATTCCGCAA |
| | | GAATGTGGTGCCAAAGACCTGTTTAGCATGATTATCGAACATCTGAAGTT |
| | | TCAGCTGGATAAAGGCACCGTTGCAATTTTTCGTAATCGTGCATTTGAAG |
| | | TTCTGGAACGTTGTGCAGTTGAAATGGTGATTATTGATGAAGCCGATCGT |
| | | CTGAAACCGAAAACCTTTGCCGAAGTTCGTGATATCTTTGACAAACTGCA |
| | | GATTCCGGTTATTCTGGTTGGTACAGATCGTCTGGATGCAGTTATTAAAC |
| | | GTGATGAACAGGTGTATAATCGTTTTCGTGCATGTCATCGTTTTGGTAAA |
| | | CTGAGCGGTGAAGATTTTAAACGCACCGTGGAAATTTGGGAAAAGCAGAT |
| | | TCTGAAACTGCCGGTTGCAAGCAATCTGAGCAGCCCGAAAATGCTGAAAA |
| | | TTCTGGTGGATGCAACCGGTGGTTATATTGGTCTGCTGGATATGATTCTG |
| | | CGTGAAGCAGCAATTCGTGCACTGAAAAAAGGTCTGCAGAAAATCGATCT |
| | | GAAAACCCTGAAAGAAGTGACCGAAGAGTACAAATAA |
| | | (SEQ ID NO: 69) |
| | TniQ | ATGCAGGCCGAGAACATCCAGCCTTGGCTGTTCAGAGTGGAACCCCTGGA |
| | | AGGCGAGAGCCTGTCTCACTTCCTGGGCAGATTCAGACGGGCCAGCTACC |
| | | TGACAGTGTCCGGCCTGGGAAAAGAGGCCGAACTTGGCGGAGCTGTGGCC |
| | | AGATGGGAGAAGTTCAGATTCAACCCTCCACCTAGCCGGCAGCAGCTGGA |
| | | AAAACTGGCCGCTGTCGTGGGAGTCGACGTGGACAGACTGGTTCTGATGC |
| | | TGCCTCCTTCTGGCGTGGGCATGAAGATGGAACCCATCAGACTGTGCGGC |
| | | GCCTGTTACGCCGAAAGCAGCTGCCACAAGATCAAGTGGCAGTTCAAGAC |
| | | CCGGCAGGGCTGCGACAGACACAAGCTGACACTGCTGAGCGAGTGCCCCA |
| | | ATTGCGGCGCCAGATTCAAGATCCCTGCTCTGTGGGTGGACGGCTGGTGC |
| | | CACAGATGCTTCACCCCTTTCGAGGAAATGGTCAAGTTCCAGAAGGACAT |
| | | CAACACCGACTGA |
| | | (SEQ ID NO: 70) |
| | LE | CACTTTGCAAGTAGATGAGGTACATTCTTTTTTTGCTCGCTACTCGCTAC |
| | | TTGCTACTCGCTACTCGCTACTCGCTACTCGCTACTTGCTACTTGCTACT |
| | | CCCTCAAATGATTAGGTGTAGCTCACTTGGATGATGTCGTTTGCCAAATT |
| | | AAATGACCACTTGACAAATTAATGTCCTTAAAAATATTTATTCCAAAACC |
| | | TTTGCAATGCAAGGGTTTTATTGTTTTAAGCCTCTTCGAGATACAAATAA |
| | | GGTTATTGACAAATTAAGTGTCCTCTTTTGGGACTTTGACAAGTTATTTG |
| | | TCCTTTCTTGAAAACAAGGCTTTGACTGAAAACTTTACCTAACTTGACAA |
| | | AATAAATGTCTTCTAACGTTAAAATACAATTATGTTTTATTAGGCAATTA |
| | | GGTTTATTATGGGTGAAGATTATCCCAGTGACTCATTAGAGTCAGAAACC |
| | | AACGAGATTGTGACGGAACTTTCCTATGAAGAAAGGCGTGTTTTAGAAGT |
| | | (SEQ ID NO: 71) |
| | RE | GTTTTAACGCATTTTCAGACTTTGGGCTAGTTGAAAGCTGCATTACTAAT |
| | | GAGTGTAAAAAGTCTTGCTCAATGCACTTGGCACTTTCAAGCTTTGGGCA |
| | | AGTTAAAAGAAGCTTGATAGTGAGATACGTGCAATTCTTTCTTAGGTTTC |
| | | AACTTTCTTTCACGCTTTGGCAGGTTGAAGGAAAGCCAATGCAATCGAAA |
| | | ACAAGTAATTAAGTTTTAATATAAAATAAACAATAGGTGAGTGGAAAGCG |
| | | AATCCAGTTACGTCCTAAGCGAATGATTTGAAGCATTCGTGGTTGATTTA |
| | | TATATATATTTAAATCAATTCAGAGGACATTAATTTGTCAACGCGGACAC |
| | | TAATTTGGCAAAACGGACATTAATCTGGCAACGCGGTCAAATAATGTGGC |
| | | AAGTGACATCACACAACAGACAATGTTAATTATTTCAAAAAAATGGACGT |
| | | AACTGGATTCGAACCAGTGACCTCTACGATGTCAACGTAGCGCTCTAACC |
| | | (SEQ ID NO: 72) |
| AP018248/ | TnsB | ATGCCCAGAAAGCCTACCAGCGAGGCCTTTCCTGGCCTGGAAATTGAGGA |
| Tolypothrix | | AGCCGCCAATCAAGAGGAAGAACAGACCAAGCACCTCCTGGTCAACGAGG |
| tenuis | | ACAGCAGCGACTACCTGAAGAAGGTGGAACTGATCGACGCCATCCGGCAG |
| PCC | | GCCCCTAACAAAGCCGCTAGAATGGATGCCATTGCCGACGCCGCTAAGGC |
| 7101/T42 | | CCTGGGCAAGAGCACAAGAACCATCAAGCGGATGGTGGAAAAGGTCGAGC |
| | | AAGTGGGCGTTGCCACACTGGCCGTGGGCAGAAAAGATAAGGGCCAGTAC |
| | | CGGATCAGCCAGCAGTGGCACGACTTCATCGTGAACCTGCACAAATGGGG |
| | | CAACAGAGAGGGCAGCAGAATCAACCACAACCAGATCTTCGGCTATCTGA |
| | | AAGCCCTCGCCAGCCAGGGCGAAAAGCTGCTGCACAAGAAGCACGACGAG |
| | | AAGTTCAAAGAGTACAGCCAAGTCCGCGAGGACCTGGTGGCTGGAACACA |
| | | CCCTTCTCACGTGACCGTGTACAAGATCATCAACAGCTACCTCGAGCAGA |
| | | AACACAAGACCGTGCGGCACCCTGGAAGCCCTATCGAGGGACAGATCATC |
| | | CAGACCACCGAGGGCATCCTGGAAATCACCCACAGCAATCAGATCTGGCA |
| | | GGTCGACCACACCAAGCTGGACATCCTGCTGATCGATGAAGAGGACAAGA |
| | | AAGTGATCAGCCGGCCTTACATCACCCTGGTCATGGACAGCTACAGCGGC |
| | | TGCGTGACCGGCTTCTATCTGGGATTTGAACCAGCCGGCAGCCACGAAGT |
| | | TGGACTGGCTCTGAGACACGCCATCCTGCCTAAGCACTACGGCACCGAGT |
| | | ACGAGCTGCAGGACACCTGGCAGATCTACGGCATCCCCGAGTACATGGTC |
| | | ACCGACCGGGCCAAAGAGTTCAAGAGCGAGCACCTGATCCAGATCAGCCT |
| | | GCAGCTGGACTTCAAGCGGCGGCTGAGAGCTTTTCCACAAGCCGGCGGAC |
| | | TGATCGAGACAATCTTCGGCACCATCAACCAGCAGATCCTGAGCCTGTAC |
| | | GGCGGCTACACAGGCAGCAGCGTGGAAGAAAGACCTCCTGAGGCCGAGAG |
| | | AACCGCCTGTCTGACACTGGACGACCTGGAAAAGATCCTCGTGCGGTACT |
| | | TCGTGGACAACTACAACCGGCACGACTACCCCAGAGTGAAGAACCAGAAA |
| | | CGGATCGAGCGGTGGAAGTCCCGGCTGCTGGAAGAACCTGAGATCCTGGA |
| | | CCAGAGAGAGCTGGATATCTGCCTGATGAAGGTCGCCATCAGAAACGTCG |
| | | AGAAGTACGGCAGCGTGAACTTCCAAGGCTGGGTGTACCAAGGCGACTGG |
| | | CTGCTGAACTACGAGGGCAAACAGGTGTCCCTGAGATACGACAAGCGGAA |
| | | CATCACCAGCGTGCTGGCCTACACCAGACCTATCAATGGCGAGCCCGGCG |
| | | AGTTCATCGGAGTGATTCAGGCCAGAGACTGCGAGCGCGAGAGAATGTCT |
| | | CTGGCTGAGCTGAATTACATCAAGAAGAAGCTGCGGGACGCCTGCAAAGA |
| | | GGTGGACAACAGCTCCATCCTGAACGAGCGGCTGAGCACCTTCGAGGACG |
| | | TGGAACAGAACCGGAAAGAGCGGCGGAGACACAGAAGAAAGAAGGCCCAG |
| | | CAAAAGCACGAGGCCAAGAGCAACAAGTCCAAGATCGTGGAACTGTTCCC |
| | | CGAGAACCTGACCACCGAAGAGATCATTAACTCCCAAGAGAACCTCACCA |
| | | GCAACTTCGACGTGAACGCCAAGAACATCGTGAATAGCATCGACAAGCAG |
| | | ATCACCCAGAACAAGCCCAATCCTAACCAGACCAGCAAGGCCAGACGCAG |
| | | ACCTAGAGTGGGCGAGAAGGACTGGAACCAGTTCCTGGAAAACAACTGGT |
| | | GA |
| | | (SEQ ID NO: 73) |
| | TnsC | ATGAGCGAGATCAACCTGGCCAACGCCAACCTGGAATTTCAGAACAGCTA |
| | | CGACGCCAGCCTGCAGAGCGCTGAGGAACTGAGAAGAAGCCCTGAGGCTC |
| | | AGGCCGAGGTGGAAAGAATCGGCAAGGCCAACACCTACCTGCCTCTGGAC |
| | | AGAGACACCGAGCTGTTCGACTGGCTGGACGATCAGAGGGATGCCAAGCT |
| | | GTGTGGCTACGTGACAAGCGCCACAGGCTCTGGACTGCTGAAAGCCTGCC |
| | | AGCTGTACAGAACCCAGTACGTGAAGCGGAGAGGCACCCTGCTGGAAATC |
| | | CCTGCCACAGTGCTGTACGCCGAGATCGAACAACACGGCGGACCCACCGA |
| | | TCTGTACTGCAGCATCCTGGAAGAGATCGGACACCCTCTGGCTCACGTGG |
| | | GCACACTGAGAGATCTGAGATCTAGAGCCTGGGGCACCATCAAAGGCTAC |
| | | GGCGTGAAGATCCTGATCATCGGCAACGCCGACTACCTGACACTGGAAGC |
| | | CTTCAACGAGCTGATCGACGTGTTCACCAAGATGCGGATCCCCGTGATCC |
| | | TCGTGGGCACCTACTACCTGGGCGACAATATCCTGGAACGGAAGTCCCTG |
| | | CCTTACGTGCGGGTGCACGACAGCTTTCTGGAAAGCTACGAGTTCCCCAA |
| | | CCTGAACGAAGAGGAAGTGATCGAGGTCGTCAACGACTGGGAAGAGAAGT |
| | | TCCTGCCTGAGAAGCACCGGCTGAATCTGACCCAGATGGAAAGCGTGGTG |
| | | TCCTACCTGCGGCTGAAGTCTGGCGGACTGATCGAGCCTCTGTACGACCT |
| | | GCTGCGGAAGATCGCCATCCTGAAGATCGACGAGCCCCACTTCGAGCTGA |
| | | ACCAGTACAACCTGACCAAGAGATTCGGCAGACGGAAAGAACCCAAAGTG |
| | | AAGTTCAAGCGGAAGTCCTGA |
| | | (SEQ ID NO: 74) |
| | TniQ | ATGGAACCTGAGGTGCTGCAGAACCCTCCTTGGTACATCGAGCCCAAAGA |
| | | GGGCGAGAGCATCAGCCACTACTTCGGCAGATTCAGACGGCACGAGGCCG |
| | | TGTGTGTTAGCTCTCCTGGCACACTGTCTAAGGCCGTTGGCATCGGACCT |
| | | GTGCTGGCCAGATGGGAGAAGTTCCGGTTCAACCCATTTCCTAGCCAGAA |
| | | AGAGCTGGAAGCCATCGGCAAGCTGATCGGCCTGGACGCCGATAGAATTG |
| | | CCCAGATGCTGCCTAGCAAGGGCGAGAAGATGAAGCTGGAACCTATCCGG |
| | | CTGTGCGCCGTGTGTTATGCCGAACAGGCCTACCACAGACTGGAATGGCA |
| | | GTTCCAGAGCACCGTGGGCTGCGACAGACACAAGCTGAGACTGCTGAGCG |
| | | AGTGCCCCTTCTGCAAAGAGAGATTCGCTATCCCCGCTCTGTGGGAGCAG |
| | | GGCGAGTGTAACAAGTGTCACACCCCATTCCGGTCCATGAAGAAGCGGCA |
| | | GAAGGCCTACTGA |
| | | (SEQTDNO: 75) |
| | LE( | TCAAAATGGTAATCAAGAAACTTTAGATAGCACTGCAACTGTAGAAATGA |
| | | AACCTGGAGATGTATTTGTGATAGAAACTCCAGGCGGAGGAGGATTTTTT |
| | | TAAGAGTTTTGAGGAGTAAGATTTGAGTAATGAAAATATAGTTTTTCCAA |
| | | AACTCAATTTATACTATTGTTATCGTTAAAAATAACGATAATTATTTGAC |
| | | TTCCATATGGTGTCCATTAAATAATTATTGTCCATTTTAAAGAATTATTG |
| | | TCCATTTTCAATTTATAGCGCTTATAGCTGAAACCTATTCATAGCAAGGG |
| | | GTTCAGCTATTTTGTTTTTAGATTATTCTTTTCCTATTTTTAAATCAAAT |
| | | GATGTCATAAATCATATAAAATTTTAAAGTAAATGATGACATATTTTTTG |
| | | GAGATGAGCTGATGCCCAGGAAGCCTACGAGCGAAGCCTTTCCAGGATTA |
| | | GAGATTGAGGAAGCGGCAAATCAGGAAGAAGAGCAAACAAAGCACCTACT |
| | | (SEQ ID NO: 76) |
| | RE | GTTTCAATAACCCTCACGGCTGGTGGTGGGTTGAAAGATTTTATCGCTAT |
| | | GTTTTCAGCAATTTCACTATTATGTCTTCTATTGTAAAATTATTTATTAG |
| | | GGTGGTTTGAAAGGAGCACTTCAATGGCATATTGCCAAAACCTGTGCAGT |
| | | TGATCCCATAGATCTCTAGATACATTTAGAGTCAATGTATCTTGCGAGAA |
| | | ACTTAACTTAATTTTGGACAATAATTATTTAAAACTGGTTTCAACTCTGG |
| | | ACAATAATTATTTAAAACTGGTTTGAGTGCTGAAAGTCAAGAAAATAGGT |
| | | TACTTATGTCCCTTAACTACGTCAAAATGGACAAGAATTCTTTAAAACTG |
| | | ACAATAATAATTTAATGTACATATGGAGTTAAGCGGATTCGAACCGCTGG |
| | | CCCCTTCAATGCCATTGAAGTGCTCTACCAACTGAGCTATAACCCCGGAA |
| | | TACGCGTTTCTAATTATCGCTGAATAATATTATCTTTGTCAAGATTGGTA |
| | | (SEQ ID NO: 77) |
| AP018280/ | TnsB | ATGACCGTGTACCGGATCCTGCAGCCTCTGATCGACAAGGTGGAAAAGGC |
| Calothrix | | CAAGAGCATCAGAAGCCCCGGCTGGCGAGGAAGCAGACTGAGCATCAAGA |
| sp. NIES- | | CCAGAGATGGCAACGATCTGCAGGTCGAGCACAGCAATCAAGTGTGGCAG |
| 4101/T43 | | TGCGATCACACCCTGGTGGATGTGCTGCTGGTGGACAGACACGGCAAGCT |
| | | GCTGTCTAGACCTTGGCTGACCACCGTGATCGACAGCTACAGCAGATGCA |
| | | TCATGGGCATCAACCTGGGCTACGACGCCCCTAGCTCTAAGGTTGTGGCT |
| | | CTGGCCCTGAGACACGCCATCCTGCCTAAGCAGTACGGCAGCGACTACGG |
| | | CCTGAATGAGGAATGGGGCACATCTGGCCTGCCTCAGCACTTCTATACCG |
| | | ACGGCGGCAAGGACTTCAGATCCAACCATCTGCAGCAGATCGGCGTGCAG |
| | | CTGGGCTTCGTTAGACACCTGAGAGACAGACCTAGCGAAGGCGGCAGCGT |
| | | GGAAAGACCCTTCAAGACCCTGAACACCGAGCTGTTCAGCACCCTGCCTG |
| | | GCTACACCGGCAGCAATATTCAGCAGAGGCCTGAGGAAGCCGAGAACGAG |
| | | GCTTGTCTGACACTGCACCAGCTGGAAAAGATCCTCGTGCGGTACATCGT |
| | | GGACAACTACAACCAGCGGATCGACGCCAGAATGGGCGACCAGACCAGAT |
| | | TTCAGAGATGGGAGAGCGGCCTGATCGCCGCTCCTGATCTGCTGTCTGAG |
| | | AGAGAGCTGGACATCTGCCTGATGAAGCAGACCAGACGGCACATCCAGAG |
| | | AGGCGGCTACCTGCAGTTCGAGAACCTGATGTACCGGGGCGAGAATCTGG |
| | | CCGGATATGCCGGCGAAAAGGTGGTGCTGAGATACGACCCCAGAGACATC |
| | | ACCACCATCATGATCTACTGCACCGAGGGCGACAAAGAGGTGTTCCTGAC |
| | | CAGAGCCTACGCTCAGGACCTGGAAACCGAGGAACTGAGCCTGGATGAGG |
| | | CCAAGGCCAGCAGCAGAAAAGTGCGCGAAGCTGGACAGGCCGTGAACAAC |
| | | AGATCCATCCTGGCCGAAGTGCGGGAAAGAGAAGTGTTCCCTACACAGAA |
| | | AAAGACCAAGAAAGAGCGGCAGAAGCTGGAACAGACCGAGCTGAAGAAGT |
| | | CCAAGCAGCCCATTCCTATCGAGCCAGAGGAACTGGACGAAGCCGTGTCC |
| | | ACCGAGGTGGAAACAGAGCCTGAGATGCCCGAGGTGTTCGACTACGAGCA |
| | | GATGAGAGAAGATTACGGCTGGTGA |
| | | (SEQ ID NO: 78) |
| | TnsC | ATGAGCAGCAAGGCCAGCACAACAGAGGCCCAGGCTATTGCTCAGCAGCT |
| | | GGGAGATATCCCCGCCAACAACGAGAAGCTGCAGGCCGAGATCCAGCGGC |
| | | TGAACAGAAAGGGCTTCGTGCCCCTGGAACAAGTGAAAACCCTGCACGAC |
| | | TGGCTGGAAGGCAAGCGGCAGTCTAGACAGTCTGGCAGAGTTGTGGGCGA |
| | | GAGCAGAACCGGCAAGACCATGGGCTGTGACGCCTACCGGCTGAGAAACA |
| | | AGCCCAAGCAAGAGAGCGGCAAGCCTCCTACAGTGCCCGTGGCCTACATC |
| | | CAGATTCCTCAAGAGTGCGGCGCCAAAGAACTGTTCGGCGTGATCATGGA |
| | | ACACCTGAAGTACCAAGTGACCAAGGGCACCGTGGCCGAGATTAGAGACA |
| | | GAACCCTGCGGGTGCTGAAAGGCTGCGGAGTGGAAATGCTGATCATCGAC |
| | | GAGGCCGACCGGTTCAAGCCTAAGACCTTTGCCGAAGTGCGGGACATCTT |
| | | CGACAAGCTGGAAATCGCCGTGATCCTCGTGGGCACCGATAGACTGGATG |
| | | CCGTGATCAAGCGGGACGAACAGGTGTACAACCGGTTCAGAAGCTGCCAC |
| | | AGATTCGGCAAGATGTCCGGCGAGGACTTCAAGCGGACCGTGGAAATCTG |
| | | GGAGAAGCAGATCCTGAAGCTGCCTGTGGCCAGCAACCTGGGCAGCAAGA |
| | | CAATGCTGAAAACACTGGGCGAAGCCACCGGCGGCTATATCGGACTGCTG |
| | | GACATGATCCTGAGAGAGAGCGCCATCAGAGCCCTGAAGAAGGGCCTGCA |
| | | GAAGATCGACCTGGACACCCTGAAAGAAGTGACCGCCGAGTACCGGTGA |
| | | (SEQ ID NO: 79) |
| | TniQ | ATGATGGAAGCCGAGGAAATCAAACCCTGGCTGTTCCAAGTGGAACCCCT |
| | | GGAAGGCGAGAGCATCAGCCACTTTCTGGGCAGATTCCGGCTGGCCAACG |
| | | ATCTGACACCTTCTGGACTGGGACAAGCCGCTGGACTCGGCGGAGCTATT |
| | | GCCAGATGGGAGAAGTTCCGGTTCAACCCTCCACCTAGCCGGCAGCAGCT |
| | | GGAATCTCTGGCTGTGGTCGTGGGCGTCGACACCGACAGACTGGAAAAGA |
| | | TGCTTCCTCCTGCCGGCGTGGGCATGAAGATGGAACCTATCAGACTGTGC |
| | | GGCGCCTGCTACGGCGAAAGCCCTTGTCACAAGATCGAGTGGCAGTTCAA |
| | | AGAAACCGGCGGCTGCGGCAGACACAATCTGACACTGCTGAGCGAGTGCC |
| | | CCAATTGCGGCGCCAGATTCAAAGTGCCTGCTCTGTGGGTGGACGGCTGG |
| | | TGCCACAGATGCTTTACCCCTTTCGCCGAGATGGTGGAACACCAGAAGCG |
| | | GATCTGA |
| | | (SEQ ID NO: 80) |
| | LE | GATTCGACCTGATTTGGAGTAAAATGAAACAAATTGAAGTTTGACTCGTT |
| | | GAGGCTGGGTGCTGCTTCTGGAGCCGAAAACGAGGGAATATTAATGTACA |
| | | TTAACTAATTATTTGTCAATTTAACAAAATAATTGTCATATTATTCAAAA |
| | | TCACTCAATCCCTGTCATTGCAATAACTATGACAGGGATTTTGTTATTAC |
| | | AACCAGTCACAGCGCTTTCAGCTTTGATTCACAAATTAGATGTCAAAATC |
| | | CAGAATTTTCACAATTTAATTGTCACTTCTCAAAAATAGTAGACAATCAT |
| | | GATTTTGCATAAATTAACACATTAATTGTCACATTATTAGTATAATACAA |
| | | CTATGTTTTGATAAAGCACTGTATGCAGGATGCAGAATTTTCTACAACTT |
| | | CTACGACAAAGGTAAGTTGCACAGATGTTAATAGCACTGAAGCAAACATT |
| | | ATTGTTTCCGAACTTTCGGATGAAGCTTTGTTGAAAATGGAGGTAATTCA |
| | | (SEQ ID NO: 81) |
| | RE | GTTTCAATGCCCCTCCTAGCTTGAGGCGGAAAGACCTCTTGGCGATGCGA |
| | | TTGCCTTTAATTTGGCAGTTTCAAGTAAATAGTTGGTTAAAATATTTAAG |
| | | GTGGGTTGAAAGGTAAGGCAGAGGTCTGCCATTAAAAAATGCCACATGCA |
| | | TGAGGCAGTGACATTTATTTTGTTAACATTGACATCAATCTGTTAGAAAT |
| | | GACATTAATTTGTTAACAGTGACAAATAATTAGTTAATGTACAACAAACA |
| | | AAGGCGACACCCGGATTTGAACCGGGGGATGGAGGTTTTGCAGACCTCTG |
| | | CCTTACCACTTGGCTATGTCGCCACAACTAACAATTACATATATTAGCAC |
| | | CATTTCGAATATTATTCCACTTTTTTCAGCAACAGGTTAATTTTACCACC |
| | | AGTAATACGACTATCAGGGCATAAACCAAGCCATGAGGTAAAATGCTTGA |
| | | CTGTAGCAATGCCTTCGCCAGATTTCTGAGTGATGACGTAGTATCAAAGC |
| | | (SEQ ID NO: 82) |
| CP000117/ | TnsB | ATGTACCAGCAGCTGCAGGATAGCTACCCCGCCAATGATGATGGCGCCGT |
| Trichormus | | GGAACTGCAGAAGCACCAGAACAGCACCAAGACCAGCAGCAAGCTGCCCA |
| variabilis | | GCGAGAAGCTGATCACCGACGACGTGAAGCTGCGGATGGAAGTGATCCAG |
| ATCC | | AGCCTGACCGAGCCTTGCGACAGAAAGACCTACTCCGAGAAGAAGAAAGA |
| 29413/T44 | | GGCCGCCGAGAAACTGGGCGTGACCATCAGACAGGTGGAACGGCTGCTGA |
| | | AGAAGTGGCGCGAGGAAGGACTTGTCGGCCTGGCCACAACAAGAGCCGAC |
| | | AAGGGCAAGTACCGGCTGGAACAAGAGTGGGTCGACTTCATCATCAACAC |
| | | CTACACCAACGGCAACAAGAAAGGCAAGCAGATGACCCGGCACCAGGTGT |
| | | TCCTCAAAGTGAAGGGCGAAGCCAAAGAGAAGGGCCTGAAGAAAGGCGAG |
| | | TACCCCAGCCACCAGAGCATCTACAGAATCCTGGACAAGCACATCGAGGG |
| | | CAAAGAGCGGAAGGACAACGCCAGATCTCCTGGCTACAGCGGCGAAAAGC |
| | | TGACCCACATGACCCGCGACGGCAGAGAACTGGAAGTGGAAGGCAGCAAC |
| | | GACGTGTGGCAGTGCGATCACACCAGACTGGACGTGATGCTGGTGGACGA |
| | | GTACGGCGTGCTGGATAGACCTTGGCTGACCATCGTGATCGACAGCTACA |
| | | GCAGATGCGTGATGGGCTTCTACCTGGGCTTCGATCACCCCAGCAGCCAG |
| | | ATTGATGCCCTGGCTCTGCACCACGCCATCCTGCCTAAGAGCTACAGCTC |
| | | CGAGTACACCCTGAGACACGAGTGGGTTGCCTACGGCAAGCCCAACTACT |
| | | TCTACACCGACGGCGGCAAGGACTTCACCTCCATCCACACCACAGAACAG |
| | | GTGGCCGTGCAGATCGGCTTTAGCTGTGCCCTGAGAAGAAGGCCTAGCGA |
| | | CGGCGGAATCGTGGAACGGTTCTTCAAGACCCTGAACGAACAGGTGCTGA |
| | | ACACCCTGCCAGGCTACACCGGCTCTAATGTGCAGCAGAGGCCCGAGAAC |
| | | GTGGACAAGAATGCCTGTCTGACCCTGAAAAACCTGGAAATGGTGCTCGT |
| | | GCGGTACATCGTGGATGAGTACAACCAGCACACCGACGCCAGAATGAAGG |
| | | ACCAGAGCAGAATCGGCAGATGGGAGGCCGGCTCTATGGTGGAACCCTAC |
| | | CTGTACAACGAGCTGGACCTGGCCATCTGCCTGATGAAGCAAGAGCGGCG |
| | | GAAGGTGCAGAAGTACGGCTGCATCCAGTTCGAGAACCTGACCTACAGAG |
| | | CCGACCACCTGAGAGGCAGAGATGGGGAAACAGTGGCCCTGAGATACGAC |
| | | CCCGCCGATGTGACAACACTGCTGGTGTATGAGATCAACGCCGACGGCAC |
| | | CGAGGAATTTCTGGACTATGCCCACGCTCAGAGCCTGGAAACAGAGCACC |
| | | TGAGCCTGAGAGAGCTGAAGGCCATCAACAAGCGGCTGAAAGAAGCCAGC |
| | | GAGGAAATCAACAACGACAGCATCCTGGAAGCCATGCTGGACAGACAGGC |
| | | CTTCGTGGAACAGACCGTGAAGCAGAACCGGAAGCAGAGAAGGCAGGCCG |
| | | CCAGCGAGCAAGTGAATCCTGTGGAACCCGTGGCCAAGAAATTCGCCGTG |
| | | CCTGAGCCTAAAGAGGTGGAAACCGACAGCGAGCCCGACATGGAACTGCC |
| | | CAATTACGAAGTGCGCTACATGGACGAGTTCTTCGAGGAAGATTGA |
| | | (SEQ ID NO: 83) |
| | TnsC | ATGACCGATGCCAAGCCTCTGGACTTCATCCAAGAGCCTACCAGAGAGAT |
| | | TCAGGCCCACATCGAGAGACTGAGCAGAGCCCCTTACCTGGAACTGAATC |
| | | AAGTGAAGTCCTGCCACACCTGGATGTACGAGCTGGTCATCAGCAGAATG |
| | | ACCGGCCTGCTCGTGGGCGAGTCTAGATCTGGCAAGACCGTGACCTGCAA |
| | | GGCCTTCCGGAACAACTACAACAACCTGCGGCAGGGCCAAGAGCAGAGAA |
| | | TCAAGCCCGTGGTGTATATCCAGATCAGCAAGAACTGCGGCAGCCGCGAG |
| | | CTGTTCGTGAAGATTCTGAAGGCCCTGAACAAGCCCAGCAACGGCACAAT |
| | | CGCCGACCTGAGAGAGAGAACCCTGGACAGCCTGGAAATCCACCAGGTGG |
| | | AAATGCTGATCATCGACGAGGCCAACCACCTGAAGATCGAGACATTCAGC |
| | | GACGTGCGGCACATCTACGACGAGGACTCCCTGAAGATTAGCGTGCTGCT |
| | | TGTGGGCACCACCTCCAGACTGCTGGCCGTGGTTAAGAGGGATGAGCAGG |
| | | TCGTGAACCGCTTCCTGGAAAAGTTCGAGATCGACAAGCTGGAAGAGAAC |
| | | CAGTTCAAGCAGATGATCCAAGTGTGGGAGCGCGACGTGCTGAGACTGCC |
| | | TGAGGAATCTAAACTGGCCAGCGGCGAGAGCTTCAAGCTGCTGAAGCAGA |
| | | GCACCAACAAGCTGATCGGCCGGCTGGACATGATCCTGAGAAAGGCCGCC |
| | | ATCAGAAGCCTGCTGCGGGGCTACAAGAAAGTGGATCAGGGCGTGCTGAA |
| | | AGAGATCATCACCGCCACCAAGTTCTGA |
| | | (SEQ ID NO: 84) |
| | TniQ | ATGCGCGAGAGCATCAACGAGAACAAGCAGTTCTGGCTGATCAGAGTGGA |
| | | ACCCCTGGAAGGCGAGTCCATCAGCCACTTTCTGGGCAGATTCAGAAGAG |
| | | AGAAGGGCAACAAGTTCAGCGCCCCTAGCGGACTGGGAGATGTTGCTGGA |
| | | CTTGGAGCCGTGCTGGCCAGATGGGAGAAGTTCTACTTCAACCCATTTCC |
| | | GACGCACCAAGAGCTGGAAGCCCTGGCCTCTGTGGTGCAAGTGGATGTGG |
| | | ACCGGCTGAGACAGATGTTGCCTCCTCTGGGCGTGTCCATGAAGCACAGC |
| | | CCTATCAGACTGTGCGGCGCCTGTTATGCCGAGTCTCCCTGTCACAAGAT |
| | | CGAGTGGCAGTTCAAGAAAACCGTGGGCTGCGACCGGCACCAGCTGAGAC |
| | | TGCTGTCTAAGTGTCCCGTGTGCGAGAAGCCCTTTCCTGTGCCTGCTCTG |
| | | TGGGTGGACGGCATCTGCAACAGATGCTTCACCCCTTTCGCCGAGATGGC |
| | | CCAGTACCAGAAGCACTACTGA |
| | | (SEQ ID NO: 85) |
| | LE | ATGTCTACTTGTGGTAAAAATAGTGTTTTTGCTTGCCACTAACACAGAAA |
| | | AATAAAGGAAGCAATATGTATAAATTATTACAAGCTGTACATTCACATAT |
| | | TAGATGTCGCTATTTAACAAATTAATGTCGCAAGCTTTAAAGCATAAAAC |
| | | CCTTTCCCCGTAAGGATTTTATAGATTTATATGATTGTATAAAAGTGACT |
| | | AGAGATTTTTCATGGTTTTCACAAATTGAGGTCGCAAACCCGATAATTTC |
| | | ACAATTTAAGAGTCGTTTATTTTCTTCAGCCAGACAACCTAACGTTAAAC |
| | | GGCTTCACGAATTAGATGTCGCATTCCTGAGAGTGGCAATATATTTACTT |
| | | ACTCTAAAAGATAAAACCTGATTAATGGCAGTATGGCTGCATCAGTGCTG |
| | | GAAAATTAACTGTCTTATCCTATTTCAGTGTATAACTAAAAAAATTAGCT |
| | | ACTAATCTTACATAACGAGGTTTCAGTTGTGGCGTTTCAACCTGAAGACA |
| | | (SEQ ID NO: 86) |
| | RE | TAATTATGTATGTATTCATCTCCATTAGGATGGGTGAGAGTGATAATAAC |
| | | CATTCACGAAAGAATGGATTGAAAATGTAATACCTAACGATAAACAGAAA |
| | | TAGGCAAGTTATATAAATCTTTCCGGTGCAGGACTGGTTGAAATATAAAG |
| | | ATTACAAGATGTGGGTATGGGTTGAAAGGGTTCAAATCCGTCTGCTTAAC |
| | | TTTTGCTGCCAAGCATAGTGGTTAGAATAATTGTGTGCGAAATAAAGAAC |
| | | AAAAGTTTTTTGTTTAACCAAGGTATAGCAAAAGTTTTTAGAGCTTGAGC |
| | | TAAAATTGAGCTTATGGTCTTCTATTTGATAGGACTGATGTTGACCAATC |
| | | ACCCCACACAATCGATTAGTCTCAAATATTGCGACATTAATTTGTGAACG |
| | | GTTATCTTAAATGAGCCGCGACACTAATTAGTGAAACAGCGACATTAATG |
| | | TGTGAACGGCGACATCTAATGTGTGAATGTACAACAAGCTAAGAGCTTCT |
| | | TTCGGTCGGAGGTTTAACCTAAAGCCAGCAGTCGGATTTGAACCGACGAC |
| | | CTTCCGATTACAAGT |
| | | (SEQ ID NO: 87) |
| CP001037/ | TnsB | ATGAACAGCCAGCAGAACCCCGATCTGGCCGTGCATCCTAGCGCCATTCC |
| Nostoc | | TATCGAAGGACTGCTGGGCGAGAGCGACATCACCCTGGAAAAGAACGTGA |
| punctiforme | | TCGCCACACAGCTGAGCGAGGAAGCCCAGCTGAAGCTGGAAGTGATCCAG |
| PCC 73102 | | AGCCTGCTGGAACCCTGCGACAGAACCACATACGGCCAGAAGCTGAGAGA |
| /T45 | | GGCCGCCGAGAAACTGGGAGTGTCTCTGAGAACCGTGCAGCGGCTGGTCA |
| | | AGAACTGGGAGCATGATGGACTCGTGGGCCTGACACAGACAGGCAGAGCC |
| | | GATAAGGGCAAGCACAGAATCGGCGAGTTCTGGGAGAAGTTCATCACCAA |
| | | GACCTACAACGAGGGCAACAAGGGCAGCAAGCGGATGACCCCTAAACAGG |
| | | TGGCCCTGAGAGTGGAAGCCAAGGCCAGAGAACTGAAGGACAGCAAGCCT |
| | | CCTAACTACAAGACCGTGCTGAGAGTGCTGGCCCCTATTCTGGAAAAGCA |
| | | AGAGAAGGCCAAGAGCATCAGAAGCCCTGGCTGGCGGGGAACAACCCTGA |
| | | GCGTGAAAACCAGAGAGGGCAAAGACCTGTCCGTGGACTACAGCAACCAC |
| | | GTGTGGCAGTGCGACCACACCAGAGTGGATGTGCTGCTGGTGGATCAGCA |
| | | CGGCGAGCTGCTTTCTAGACCTTGGCTGACCACCGTGATCGACACCTACA |
| | | GCAGATGCATCATGGGCATCAACCTGGGCTTCGACGCCCCTTCTAGCGGA |
| | | GTTGTTGCTCTGGCTCTGCGGCACGCCATTCTGCCTAAGCAGTACGGCTT |
| | | CGAGTACAAGCTGCACTGCGAGTGGGGCACCTATGGCAAGCCTGAGCACT |
| | | TCTACACCGACGGCGGCAAGGACTTCAGAAGCAACCACCTGTCTCAGATC |
| | | GGCGCCCAGCTCGGCTTTGTGTGCCACCTGAGAGACAGACCTAGCGAAGG |
| | | CGGCGTGGTGGAAAGACCCTTCAAGACCCTGAACGACCAGCTGTTCAGCA |
| | | CCCTGCCTGGCTACACAGGCAGCAACGTGCAAGAGAGGCCTAAGGACGCC |
| | | GAGAAGGATGCCAGACTGACCCTGAGAGAGCTGGAACAGCTGCTGATCCG |
| | | GTACATCGTGGACCGGTACAACCAGAGCATCGACGCCAGAATGGGCGATC |
| | | AGACCAGATTCGAGAGATGGGAGGCCGGACTGCCTACAGTGCCTGTGCCT |
| | | ATTCCAGAGCGCGACCTGGACATCTGCCTGATGAAGCAGAGCAGACGGAC |
| | | AGTGCAGAGAGGCGGCTGTCTGCAGTTCCAGAACCTGATGTACAGAGGCG |
| | | AGTACCTGGCCGGCTATGCCGGCGAGACAGTGAACCTGAGATTCGACCCC |
| | | AGAGACATCACCACCATCCTGGTGTACCGGCAAGAGAACAATCAAGAGGT |
| | | GTTCCTGACCAGGGCTCACGCCCAGGGACTCGAAACAGAACAACTGGCCC |
| | | TGGATGAAGCCGAAGCCGCTAGCAGAAGGCTGAGAAACGCCGGCAAGACC |
| | | ATCAGCAATCAGTCCCTGCTGCAAGAGGTGGTGGACAGAGATGCCCTGGT |
| | | GGCCACTAAGAAGTCCCGGAAAGAGCGGCAGAAACTGGAACAGGCTGTGC |
| | | TGAGATCTGCCGGCGTGGACGAGAGCAAGACAGAGTCACTGTCTAGCCAG |
| | | GTGGTCGAGCCCGATGAGGTGGAAAGCACAGAGACAGTGCACAGCCAGTA |
| | | CGAGGACATGGAAGTGTGGGACTACGAGCAGCTGCGGGAAGAGTATGGCT |
| | | TCTGA |
| | | (SEQ ID NO: 88) |
| | TnsC | ATGACAGAGGCCCAGGCCATTGCCAAACAGCTCGGCGGAGTGAAGCCCGA |
| | | CGATGAATGGCTGCAGGCCGAGATCGCTAGACTGAAGGGCAAGAGCATCG |
| | | TGCCCCTGCAGCAAGTGAAAACCCTGCACGATTGGCTGGACGGCAAGCGG |
| | | AAAGCCAGACAGAGCTGTAGAGTCGTGGGCGAGAGCAGAACCGGAAAGAC |
| | | CGTGGCCTGTGACGCCTACCGGTACAGACAGAAACCCCAGCAAGAAGTGG |
| | | GCAGACCTCCTATCGTGCCCGTGGTGTATATCCAGCCTCCTCAGAAGTGC |
| | | GGCAGCAAGGACCTGTTCAAAGAGATGATCGAGTACCTGAAGTTCCGGGC |
| | | CACCAAGGGCACCGTGTCCGATTTCAGAGGCAGAGCCATGGAAGTGCTGA |
| | | AAGGCTGCGGCGTGGAAATGCTGATCATCGACGAGGCCGACCGGCTGAAG |
| | | CCTGAGACATTTGCTGAAGTGCGGGACATCTACGACAAGCTGGGAATCGC |
| | | CGTGGTGCTCGTGGGCACCGATAGACTGGAAGCCGTGATCAAGCGGGACG |
| | | AACAGGTGTACAACCGGTTCAGAGCCTGCCACAGATTCGGCAAGCTGAGC |
| | | GGCAAGGACTTCCAGGATACAGTGCAGGCCTGGGAAGATCGGGTGCTGAA |
| | | GCTGCCTGTGTCCAGCAACCTGACCTCCAAGGACATGCTGCGGATCCTGA |
| | | CAAGCGCCACCGAGGGCTATATCGGCAGACTGGACGAGATCCTGAGAGAG |
| | | ACAGCCATCCGCAGCCTGAGCAAGGGCTTCAAGAAAATCGACAAGGCCGT |
| | | GCTGCAAGAGGTGGCCAAAGAGTACAAGTAA |
| | | (SEQ ID NO: 89) |
| | TniQ | ATGACCACACCTGACGTGAAGCCCTGGCTGTTCATCATCGAGCCCTATCC |
| | | TGGCGAGAGCCTGAGCCACTTCCTGGGCAGATTCAGACGGGCCAACCATC |
| | | TGTCTCCAGCCGGACTTGGAGGACTGGCCGGAATTGGAGCTGTGGTGGCC |
| | | AGATGGGAGAGATTCCACTTCAACCCCAGACCTAGCCAGAAAGAGCTGGA |
| | | AGCCATTGCCAGCGTGGTGGAAGTGGATGCCCAGAGACTGGCTCAGATGC |
| | | TTCCTCCTGCTGGCGTGGGAATGCAGCACGAGCCTATTAGACTGTGCGGC |
| | | GCCTGTTATGCCGAGGCTCCTTGTCACAGAATCGAGTGGCAGTACAAGTC |
| | | CGTGTGGAAGTGCGACCGGCACCAGCTGAAGATCCTGGCCAAGTGTCCCA |
| | | ACTGTCAGGCCCCTTTCAAGATGCCCGCTCTGTGGGAGGATGGCTGCTGC |
| | | CACAGATGCAGAACACTGTTCGCCGAGATGGCCAAGCAGCAGAAGTCCTG |
| | | A |
| | | (SEQ ID NO: 90) |
| | LE | CCTTTATCACCAAAGTATTCAATATTTTCTCTTAACCGAACTTTACTGTT |
| | | TTTAAGTATGCAAAAATTATTGTACATTAACTAATTATTTGTCATTGTAC |
| | | AAAAATGTACAGTGACTAATTATATGTCGTCGAGACAAATTAATGTCATC |
| | | CATTAAAATCTTGCTCGGTATAGGTTACAGCGTTTTAGTAGTATTAGGAT |
| | | AACATCTTGACAGTGACAGATTAGCTGTCATTTTGGGTAATAGTGACAAA |
| | | TTAGCTGTCGCTTCATCAGAGATAAAAAAGCTTTTGTGTATTTTCATAAT |
| | | GACAAATTGACTGTCGCTTTCTGTTTAAGTAGAATAACAATATGTTTTTA |
| | | TAAAAAAGCTTCGCATTATGAACAGTCAGCAAAATCCTGATTTAGCTGTT |
| | | CATCCCTCGGCAATTCCTATAGAAGGCTTACTAGGAGAAAGCGATATAAC |
| | | TCTTGAGAAGAATGTAATTGCCACACAACTCTCAGAGGAAGCCCAACTCA |
| | | (SEQ ID NO: 91) |
| | RE | GCAAATCTGAAATCATTACGCACGCATACAAAAATGTTTTAATAACCTGC |
| | | CAGGTACTAGGTGGGTTATCATAATTTTTATTAGGGAGGGTTGAAAGAGA |
| | | GCGCTACGTTGACATTATCGCTATAGTCTCTGTAAATAAATGACATTAAT |
| | | CTGTCACTGGCACCTAAACGACATCAATTCGTCCCGACGACAGTTAATTA |
| | | GTCCCAACGACATTAATCTGTCACCGACGACAAATAATTAGTCACTGTAC |
| | | AAAAAAAATGGACGTAACTGGATTCGAACCAGTGACCTCTACGATGTCAA |
| | | CGTAGCGCTCTAACCAACTGAGCTATACGTCCTTAACCACACGAATATTG |
| | | ATAGTAGCATATACTTTTGCGATCGCACAAGATAAAGACCCAAGCTTTTT |
| | | AAGGGGGTTTTAGATTTTGAGTGCGTAAATCCTAATTTCAAATAAAATCC |
| | | TTATTATTTCGTTACAATCAGCTTGTGCGTTAAGCATTCAAGAGTTATCA |
| | | (SEQ ID NO: 92) |
| CP001701/ | TnsB | ATGAACACATTCCCCAACGAGCAGAGCAACGCCATCGTGCTGAAGAACAC |
| Cyanothece | | CATCGTGTCCGACCTGCCTGAGACAGCCAGAGCCAAGATGGAAGTGATCC |
| sp. PCC | | AGACACTGCTGGAACCCTGCGACAGAACCACCTACGGCGAGAGACTTAGA |
| 8802/T46 | | GAGGGCGCCAAGAAACTGGGAGTGTCTGTGCGGACAGTGCAGCGGCTGTT |
| | | CAAGCAGTACCAAGAGCAAGGACTGGCCGCTCTGGTGTCCATGGAAAGAG |
| | | CCGATAAGGGCAAGCACCGGATCAACGAGTTCTGGCAGGACTTCATCGTG |
| | | AAAACCTACCAGCAGGGCAACAAGGGCAGCAAGCGGATGACCCCTAAACA |
| | | GGTGGCCCTGAAGGTGCAGGCCAAGGCTCTGGAAATCGGCGACGAACAGC |
| | | CTCCTACCTATCGGACCGTGCTGAGAGTGCTGAAGCCCATCCAAGAGAAG |
| | | CAAGAAAAGACCAAGTCCATCAGAAGCCCCGGCTGGCGGGGATCTACACT |
| | | GAGCGTGAAAACAAGAGATGGCGACGACCTGGAAATCAACTACAGCAATC |
| | | AAGTGTGGCAGTGCGACCACACCAGGGCCGATGTTCTGCTGGTGGATAGA |
| | | CACGGCGAGCTGATCGGTAGACCTTGGCTGACCACCGTGATCGACAGCTA |
| | | CAGCAGATGCATCATGGGCATCAACCTGGGCTTCGACGCCCCTAGTTCTC |
| | | AGGTTGTGGCACTGGCCCTGAGGCACGCCATTCTGCCTAAGAGATACGGC |
| | | GACGAGTACAAGCTGCACTGCGAGTGGGAGACAAGCGGCACCCCTGAGTA |
| | | CTTCTACACCGACGGCGGCAAGGACTTCAGAAGCAACCATCTGGCCCAGA |
| | | TCGGCAGCCAGCTGGGATTCGTGCACAAGCTGAGAGACAGACCTAGCGAA |
| | | GGCGGCATCGTGGAAAGACCCTTCAAGACCCTGAACCAGAGCCTGTTCAG |
| | | CACCCTGCCTGGCTACACAGGCAGCAACGTGCAAGAGAGGCCTAAAGAGG |
| | | CCGAGAAAGAGGCCAGCCTGACACTGAGAGAGCTGGAACAGCTGATCGTG |
| | | CGGTTCATCGTGGACAAGTACAACCAGAGCATCGACGCCCGGATGGGCGA |
| | | CCAGACAAGATACCAGAGATGGGAGGCCGGACTGAGAAGGCAGCCTGAGC |
| | | CTATCAGCGAGCGCGAGCTGGATATCTGCCTGATGAAGGCCGCTCGGAGA |
| | | ACAGTGCAGAGAGGCGGCTATCTGCAGTTCGAGAACGTGATGTACCGGGG |
| | | CGAGTACCTGGAAGGCTATGCCGGCGATACCGTGATCCTGAGATACGAGC |
| | | CCAGAGACATCACCACCATCTGGGTGTACCGGCAGAAAAAGCACCAAGAG |
| | | GTGTTCCTCACCAGAGCACATGCCCAGGATCTGGAAACCGAGCAGCTGTC |
| | | TGTGGACGAGGCCAAAGCCTCTGCCAAAAAACTGAGAGATGCCGGCAAGA |
| | | CCATCAGCAACCAGTCCATCCTGCAAGAAGTGATCGAGAGAGAGGCCCTG |
| | | GTCGAGAAGAAGTCCCGGAAGCAGAGACAGAAGGCCGAGCAGGCCTACAA |
| | | GCAAGAGAAACAGCCCAGCATCATCGAGACAGTGGAACCCATTGAGCCCG |
| | | AGCCTCTGACACAGACCGAGGTGGACGATATCGAAGTGTGGGACTACGAC |
| | | CAGCTGCGGGACGATTATGGCTGGTGA |
| | | (SEQ ID NO: 93) |
| | TnsC | ATGACACAGGCCCAAGAGATCGCCCAGAAGCTGGGCGACCTGAATCCTGA |
| | | TGAACAGTGGCTGCAGATGGAAATCGCCCGGCTGAACAGACAGAGCATCG |
| | | TGCCCCTGGAACACATCAGGGATCTGCACGAGTGGCTGGACGGCAAGAGA |
| | | AAGGCCAGACAGTCCTGTAGACTCGTGGGCGAGAGCAGAACCGGAAAGAC |
| | | CGTGGCCTGTGAAGCCTACACACTGCGGAACAAGCCCATCCAGCAGGGCA |
| | | GACAGACACCCATTGTGCCCGTGGTGTACATCATGCCACCTACCAAGTGC |
| | | GGCAGCAAGGACCTGTTCAAAGAGATCATCGAGTACCTGCGGTACAAGGC |
| | | CGTGAAGGGCACCGTGTCCGAGTTCAGATCCAGAGCCATGGAAGTGCTGA |
| | | AGGGCTGCGAGGTGGAAATGATCATCATCGACGAGGCCGACCGGCTGAAG |
| | | CCCGACACATTTCCTGATGTGCGGGACATCAACGACAAGCTGGAAATCAG |
| | | CGTGGTGCTCGTGGGCAACGACAGACTGGATGCCGTGATCAAGCGGGACG |
| | | AACAGGTGTACAACCGGTTCAGAGCCCACAGAAGATTCGGCAAGCTGGCC |
| | | GGCGTGGAATTCAAGAAAACAGTGGCCATCTGGGAAGAGAAGGTGCTGAA |
| | | GCTGCCCGTGGCCAGCAATCTGACAAGCAGCGCCCTGATCAAGATCCTGG |
| | | TCAAGGCCACCGAGGGCTACATCGGCAGACTGGACGAGATTCTGAGAGAG |
| | | GCCGCCATCAAGAGCCTGATGAAGGGCCACAAGCGGATCGAGAAAGAGGT |
| | | GCTGCAAGAGGTCGCCAAAGAGTACAGCTGA |
| | | (SEQ ID NO: 94) |
| | TniQ | ATGAAGGCCACCGACGAGATCAAGCCTTGGCTGTTCGCCGTGGAACCTAT |
| | | CGAGGGCGAGAGCCTGTCTCACTTCCTGGGCAGAGTGCGGCGGAGAAACC |
| | | ACCTGTCTCCATCTGCTCTGGGACAGCTGGCCGGAATCGGAGCCAAAATT |
| | | GCCAGATGGGAGCGCTTCCACCTGAATCCATTTCCAAGCGACGCCGACCT |
| | | GAAGGCCCTGGGAGAAATCGTTGGAGTGGAAGGCAAGCGGCTGCGGCTTA |
| | | TGTTGCCTCCTAAGGGCGAAAGAATGATGTTCGACCCCATCAGACTGTGC |
| | | GGCGCCTGTTATGGCGAAGTGCCCTGTCACAAGATCGAGTGGCAGTTCAA |
| | | GAGCGTTTGGAGATGCGAGAAGCACAGCCTGAAGCTGCTGAGCAAGTGCC |
| | | CCAACTGCCGGAAGAAGTTCAAGATCCCCGCTCTGTGGGAGTTCGGCGAG |
| | | TGCGATAGATGCCGGCTGAGCTTCCAAGAGATCCGGTGA |
| | | (SEQ ID NO: 95) |
| | LE | TCTCCTAAATTCGTTAACTTAATCTATATATCCTAACTTACTCAAAAAGT |
| | | CATTTAACTCCCCTAAAGTCTCCTCTCGCTGCGCTTCCAACTCCTGTACA |
| | | GTGACACATTGTTTGTCATCGGTGACAGATTAGTGTCGTCTTTTAAAGAC |
| | | CTTACTCAATAAGGCTTACGTCCATTTTACACTCATTTGTACTATTTTTG |
| | | TTTGGTGACAAAATAAGTGTCGCTTTTTGCTTTTATGACAAATTAATTGT |
| | | CGTTTTTTCATAAAGCTTCAAAAATAATTGTGACAAATTCCATGTCACTT |
| | | TTTCTATAAATGTCTGCTAAAATAACATTATGGTTTTTAAAATAGTGTTC |
| | | TAATTATGAGATGAATACTTTTCCTAATGAGCAGTCTAATGCAATTGTAC |
| | | TAAAAAATACCATTGTATCGGATTTGCCAGAAACGGCACGGGCTAAAATG |
| | | GAGGTCATCCAGACACTTCTAGAACCCTGCGATCGCACAACTTACGGAGA |
| | | (SEQ ID NO: 96) |
| | RE | GTTTCAACGACCATTCCCAACAGGGGTGGGTGAAATATAGTCTCAATATT |
| | | TTCAATGTTAAGATGGATTGAAAGGCGCACTTCGTTCGGGAACATACTAT |
| | | CGAAGTATTAAAGATAAATGCCAATGCTCAGATCATGACAATTAATTTGT |
| | | CACCAGTGCTTAAACGACAGCAATTTGTCACAAAGACAGTTAATTTGTCT |
| | | CCACGACACTAATCTGTCACCGATGACAAATAATATGTCACTGTACAAAT |
| | | CGGGATGACAGGATTTGAACCTGCGGCCCCTTCGTCCCGAACGAAGTGCG |
| | | CTACCAAGCTGCGCTACATCCCGTAAAATTAAACAGCATTTCTATTATAG |
| | | CACGATCGCCCCTAAGACTCTATCCCCTCGCAAACTTTAATGAACTGCCG |
| | | ATCAAGAGCCCCTACCCAGAATGATAAGCTAACAGATGGACTAAAATTCG |
| | | TCAGTAAGCTACTATGACTCAAGGTAATAATACCCCCTATTTACTCCGTG |
| | | (SEQ ID NO: 97) |
| CP003610/ | TnsB | ATGTCCGTGTTTGCCCTGATGGCCGACAAGAAGTTCGAGCTGACCGAGAA |
| Calothrix sp. | | GTTCACCCAGCTGCCTGAGGCCGTGTTTCTGGGCGAGAACAACTTCGTGA |
| /T47 | | TCGACCCCAGCCAGATCATCCTGGAAACCAGCGACAAGCACAAGCTGACC |
| | | TTCAACCTGATGCAGTGGCTGGCCGAGTCTCCCAACAGAACCATCAAGAG |
| | | CCAGCGGAAGCAGGCCATTGCCTCTACACTGGGCGTGTCCACCAGACAGG |
| | | TGGAAAGACTGCTGAAGCAGTACGACGAGGACCGGCTGTCTGAGACATCT |
| | | GGCCTGCAGAGAAGCGACAAGGGCAAGTACAGAGTGTCCGACTACTGGCA |
| | | AGAGTTCATCAAGACCACCTACGAGAAGTCCCTGAAGGACAAGCACCCTA |
| | | TCAGCCCCGCCTCTATCGTGCGGGAAGTGAAGAGACACGCCATCGTGGAC |
| | | CTGAAGCTGGAACAGGGCAACTACCCTCATCCTGCCACCGTGTACCGGAT |
| | | CCTGAATCCTCTGATCGAGCAGCAAGAGCGGAAGAAAAAAGTGCGGAACC |
| | | CTGGCAGCGGCAGCTGGATGACAGTGGAAACAAGAGATGGCAAGCAGCTG |
| | | AAGGTGGACTTCAGCAACCAGATCATTCAGTGCGACCACACCAAGCTGGA |
| | | CATCCGGATCGTGGATAGCGACGGCATCCTGCTGACCGAAAGACCTTGGC |
| | | TGACCACCGTGGTGGATACCTTCTCCAGCTGCGTGAACGGCTTTCACCTG |
| | | TGGATCAAGCAGCCTGGCTCTGCCGAAGTGGCTATCGCCCTGAGACATGC |
| | | CATCCTGCCTAAGCAGTACCCCGACGATTACGAGCTGGGCAAGCCCTGGA |
| | | AGATCTACGGACACCCCTTCCAGTACTTTTTCACCGACGGCGGCAAGGAC |
| | | TTCAGATCCAAGCACCTGAAAGCCATCGGCAAGAAACTGGGCTTCCAGTG |
| | | CGAGCTGAGAGACAGACCTATCCAAGGCGGCATCGTGGAACGGATCTTCA |
| | | ACACCATCAACACCCAGGTGCTGAAGGACCTGCCTGGCTACACAGGCCCC |
| | | AATGTGCAAGAGAGGCCTGAGAACGCCGAGAAAGAGGCCTGTCTGTCCAT |
| | | CCACGACCTGGACAAGATCCTGGCCAGCTTCTTCTGCGACATCTACAACC |
| | | ACGAGCCTTATCCTAAGGACACCCGGATCACCAGATTCGAGCGGTGGTTC |
| | | AAAGGCATGGGAGAGAAGCTGCCCGAGCCTCTGAATGAGAGAGAGCTGGA |
| | | TATCTGCCTGATGAAGGAAGCTCAGAGAGTCGTTCAGGCCCACGGCAGCA |
| | | TCCAGTTCGAGAACCTGGTGTACAGAGGCGAGAGCCTGAATGCCCACAAG |
| | | GGCGAGTATGTGACCCTGAGATACGACCCCGACCACATCCTGACACTGTA |
| | | CGTGTACAGCTACGACGTGAACGACGAGCTGGAAAACTTCCTGGGCTACG |
| | | TGCACGCCATCAACATGGACACACAGGACCTGAGCCTGGAAGAACTGAAG |
| | | TCTCTGAACAAAGAGCGGAGCAAGGCCAGAAGAGAGCACAGCAATTACGA |
| | | CGCCCTGCTGGCCCTGAGCAAGCGGAAAGAACTGGTGGAAGAGAGAAAGC |
| | | AGGGCAAGAAAGAGAAGCGGCAGGCCGAGCAGAAGAGACTGAGAGCCGCC |
| | | AGCAAGAAAAACAGCAACGTGGTGGAACTGCGGCAGAACAGAGCCAGCAG |
| | | CAGCTCCAACAAGGACGAGAAGGATGAGAAGATCGAACTGCTGCCAGAGC |
| | | GGGTGTCCCGCGAGGAACTGAAAGTGGAAAAGATCGAGCCTCAGCTGGAA |
| | | ATCCTGGATAAGGCCGAGACACCTCCTCAAGAGCGGCACAAGCTCGTGAT |
| | | CAGCAGCAGAAAGCAGCACCTCAAAAAGATCTGGTGA |
| | | (SEQ ID NO: 98) |
| | TnsC | ATGGCCAGATCTCAGCTGGCCATCCAGAGCAGCGTGGAAGTGCTGGTTCC |
| | | TCAGCTGGACCTGAATGCCCAGCTGGCTAAGGTGGTGGAAGTGGAAGAGA |
| | | TCTTCAGCAACTACTTCATCCCCACCGACAGAAGCAGCGAGTACCTGAGA |
| | | TGGCTGGACGAGCTGCGGATCCTGAGACAGTGTGGCAGAGTGATCGGCCC |
| | | CAGAGATGTGGGCAAGTCTAGAGCCAGCCTGCACTACCAGGGCCAAGACC |
| | | AGAAACGGATCAGCTACGTCAGAGCTTGGAGCGCCAGCAGCAGCAAGAGA |
| | | CTGTTCAGCCAGATCCTGAAGGACATCAAGCACGCCGCTCCTATGGGCAA |
| | | GCGCGACGATCTTAGACCTAGACTGGCCGGCTCTCTGGAAGTGTTCGGCT |
| | | TCGAGCAAGTGATCATCGACAACGCCGAGAACCTGCAGAAAGAGGCCCTG |
| | | CTGGATCTGAAGCAGCTGTTCGACGAGTGCCACGTGCCAATCGTGCTGAT |
| | | CGGAGGCCAAGAGCTGGACACCATCCTGGACGAGTTCGACCTGCTGACCT |
| | | GCTTTCCCACACTGTACGAGTTTGACGGCCTGGATGAGAACGACTTCAAG |
| | | AAAACCCTGAACACCATCGAGTTCGATATCCTGGCTCTGCCCGAGGCCAG |
| | | CAATCTGTCTGAGGGCATCATCTTCGAGCTGCTGGCCGAGTCTACAGGCG |
| | | CCAGAATTGGCCTGCTGGTCAAGATCCTGACAAAGGCCGTGCTGCACAGC |
| | | CTGAAGAACGGCTTCTCCAAGATCGACCAGAACATCCTGGAAAAGATCGC |
| | | CAACAGATACGGCAGACGGTACATCCCTCCTGAGAAGCGGAACAACAAGT |
| | | GA |
| | | (SEQ ID NO: 99) |
| | TniQ | ATGGCCGAGGACATCTACCTGCCTAAGAGAGAGATCATCAGCAACAAAGA |
| | | GATCAACAAGGGCGACGAGATCCTGCCTAGACTGGGCTTCGTGGAACCCT |
| | | ACGAGTGCGAGAGCATCAGCCACTACCTGGGCAGAGTGCGGAGATTCAAG |
| | | GCCAACAGCCTGCCTAGCGGCTACAGCCTGGGAAAGATCGCCGGAATTGG |
| | | CGCCGTGACCACCAGATGGGAGAAGCTGTACCTGAATCCATTTCCTAGCG |
| | | AGACAGAGCTGGAAGCCCTGGCCAAAGTGATCGAGGTGGAAGTGGAACGG |
| | | CTGCGGCAAATGCTGCCTCCTAAGGGCATGACCATGAAGCCCAGACCTAT |
| | | CAGACTGTGCGCCGCCTGTTATGCCGAGTCTCCCCACCACAGAATCGAGT |
| | | GGCAGTTCAAGGACGTGATGGTCTGCGACAGACACCAGCTGCCTCTGAGC |
| | | ACCAAGTGCAAGAATTGCGGCACCCCTTTTCCAATACCTGCCGATTGGGT |
| | | TCGAGGCGAGTGCCCTCACTGCTGCCTGAGCTTTACCAAGATGGCCAAGC |
| | | GGCAGAAGTCCGGCTAA |
| | | (SEQ ID NO: 100) |
| | LE | AATTGCAGTGGGATGAGAGGGTTCTAGATAGCTGATAGGAGTTACAGGAT |
| | | ACCACTGTTTAGTCCAGGAAAAGTTAGTCATCATCAAATTAACTAATTTA |
| | | TTCGACTCAAATTTGAAAAATGAGTAAAAAGCGGCATTTAATGTGCGAAT |
| | | GTTGTACATTCGCACATTATATGTCGCTTTTCGCAAGTTAGGTCGCAACC |
| | | GCATTTAACTGCTATAAACCCTATTTTACAAAGGTTTGATGCTCTTAGCA |
| | | CATCAAGCCCACGAATTTACTTAATTCGCATATTCCATGTCGCAAACTAA |
| | | ATATTCGCAAATTGAATGTCGTTTATTAAAATTTGTCACTTCGCAAATTG |
| | | TTTGTCGTATTATTGAGCGATTCATGGTACATTGGTACTCTAATGAGTGT |
| | | TTTTGCTCTAATGGCAGACAAAAAATTTGAATTGACAGAAAAATTTACAC |
| | | AACTTCCTGAAGCTGTTTTTCTTGGCGAGAATAATTTCGTAATAGATCCA |
| | | (SEQ ID NO: 101) |
| | RE | ATCAGACTCTTAATTTAAGTGATAGAGATAATATTTAAGCACAGATATAT |
| | | TTCTTACTCAGCAATAGCATTTAGTATTTGCATGGAAATAAATAGCTTTG |
| | | AGACAACATTAATTTGTTAACGATGTCTTTGAGGATTTAGGGGACATCAA |
| | | TTTGTTAAAAAAGACATTAATTTTGTTAACGACGACAAATTATTTGTAAT |
| | | CGACTTTAGGACAAATAATTTGTCGCTTTATGTACTTTGACAAATAATGT |
| | | GTCGCTCTACATCAGTTAATCGACAATAACCAAGCGACGTTAATTTGCGA |
| | | AAACCTATAATCATCAATATAGTACACAAATCTGTCGAAAGCGACACTAA |
| | | TTTGCTAATAACGACACTAATGTGCGAAAAGCGACATTTAATGTGCGAAA |
| | | GTACAAATGTACAAAATGGGCGACCTGGGGCTCGAACCCAGAACCAGCAG |
| | | ATTAAGAGTCTGATGCTCTACCATTGAGCTAGTCGCCCTCACCATTTACT |
| | | (SEQ ID NO: 102) |
| CP003620/ | TnsB | ATGGCCACCGACAATCCTAATGCCAGCGGCATCGTGACCGAGCTGTCTCA |
| Crinalium | | CGAGGCCAAGCTGAAGCTGGAAATCATCGAGAGCCTGCTGGAACCCTGCG |
| epipsammum | | ACAGACAGACATACGGCGAGAGACTGAAGGACGCCGCCAAGAAACTGGGC |
| PCC | | AAGTCTGTGCGGACAGTGCAGCGGCTGGTGCAGAAATGGGAAGCCGAAGG |
| 9333/T48 | | ACTGCTGGCCCTGACCGGAACACAGAGAGTGGATAAGGGCAGACACCGGA |
| | | TCAGCCAGGACTGGCAGGACTTCATCATCAAGACCTACCGCGACGGCAAC |
| | | AAGGGCAGCAAGCGGATGAGCAGAAAACAGGTGGCCCTGAGAGTGGAAGT |
| | | GCGGGCCAAAGAACTGGGCGACGAGGACTACCCCAACTACCGGACAGTGT |
| | | ACAGAGTGCTGCAGCCCCTGATTGAGGCCCAAGAACAGAAAAAAGGCGTG |
| | | CGGACACCTGGCTGGCGAGGCTCTCAACTGAGCGTGAAAACCAGAACCGG |
| | | CGACGACATCAGCGTGGAATACTCCAACCACGTGTGGCAGTGCGACCACA |
| | | CATGGGTTGACGTGCTGGTGGTGGATATCGAGGGCGAGATCATCGGCAGA |
| | | CCTTGGCTGACCACCGTGATCGACACCTACAGCAGATGCATCCTGGGCAT |
| | | CAGAGTGGGCTTCGATGCCCCTAGTTCTCAGCTGGTTGCCCTGGCTCTGA |
| | | GACACGCCATGCTGCCCAAGAATTACGGCACCGAGTACGAGCTGCACTGC |
| | | CAGTGGGGCACATATGGCAAGCCCGAGTACCTGTTTACCGACGGCGGCAA |
| | | GGACTTCAGAAGCGAGCACCTGAAGCAGATCGGCGTGCAGCTGGGCTTCA |
| | | CCTGTATCCTGAGAGACAGACCTAGCGAAGGCGGCGTGGTGGAAAGACCT |
| | | TTCGGCACCCTGAACACCGAACTGTTTGCCGGCCTGCCTGGCTACGTGGG |
| | | CTCTAACGTTCAGCAGAGGCCTGAGCAGGCCGAGAAAGAGGCTTGTCTGA |
| | | CCCTGCCTGAGCTGGAAAAGCGGATCGTGCGGTACATCGTGGACAACTAC |
| | | AACCAGCGGATCGACAAGAGAATGGGCGACCAGACCAGATACCAGAGATG |
| | | GGAGGCTGGCCTGCTGGCCACACCTGATCTGATCGGAGAGAGAGATCTGG |
| | | ACATCTGCCTGATGAAGCAGACCAACCGGTCCATCTACAGAGAGGGCTAC |
| | | ATCAGATTCGAGAACCTCATGTACCAGGGCGAACACCTGGCCGGATATGC |
| | | CGGCGAAAGAGTGGTGCTGAGATACGACCCCAGAGACATCACCTCTGTGC |
| | | TGGTGTACCAGCCTCAGAAAGACAAAGAGGTGTTCCTGGCCAGAGCCTAC |
| | | GCCACAGGACTGGAAGCTGAACAGGTGTCCCTCGAGGAAGTGAAGGCCAG |
| | | CAACCAGAAGATCAGAGAGAAGGGCAAGACCATCAGCAACCACAGCATCC |
| | | TGGAAGAAGTCCGCGACCGGGATATCTTCGTGGCCAAGAAAAAGACCAAG |
| | | AAAGAGCGCCAGAAAGAGGAACAGAAGCAGCTGCACAGCGCCGTGTCCAA |
| | | GTCTCAGCCTGTGGAAGTGGAACCCGAGCCTGAGATCGAGGATACCCCTG |
| | | TGCCTAAGAAAAAGCCCCGGGTGCTGAACTACGATCAGCTGAAAGAGGAC |
| | | TACGGCTGGTAA |
| | | (SEQ ID NO: 103) |
| | TnsC | ATGGCCGAGAACAAGGCCCAGTCTGTGGCTGAGCAGCTGGGCGAGATCAA |
| | | GAGCCTGGATGCCAAACTGCAGGCCGAGATCGAGAGACTGAGAGGCAAGA |
| | | CCCTGCTGGAACTGGAACAGGTGTCCAAGCTGCACGACTGGCTGGAA |
| | | GGCAAGCGGAGAAGCAGACAGAGCTGTAGAGTCGTGGGCGAGAGCAGAAC |
| | | CGGAAAGACCGTGGCCTGCGACAGCTACAGACTGAGACACAGACCCATCC |
| | | AAGAAGTGGGCAAGCCTCCTATCGTGCCCGTGGTGTATATCCAGCCTCCT |
| | | CAAGAGTGTAGCAGCGGCGAGCTGTTCAGAGTGATCATCGAGCACCTGAA |
| | | GTACAACATGGTCAAGGGCACCGTGGGCGAAATCCGCAGCAGAACACTGC |
| | | AGGTCCTGAAGAGATGCGGCGTGGAAATGCTGATCATTGACGAGGCCGAC |
| | | CGGCTGAAGCCTAAGACCTTTGCTGACGTGCGGGACATCTTCGACAACCT |
| | | GGGCATCTCTGTGGTGCTCGTGGGCACCGATAGACTGGACACCGTGATCA |
| | | AGCGGGACGAGCAGGTCTACAACCGGTTCAGAGCCAGCTACCACTTCGGC |
| | | CAGCTGAAGGGCAACAAGTTCAAAGAGACAGTCGAGATCTGGGAGCAAGA |
| | | CGTGCTGAGACTGCCCGTGCCTAGCAACCTGGGAAGCAAGCCCATGCTGA |
| | | AGATCCTGGGAGAAGCCACCGGCGGCTATATCGGCCTGATGGACATGATC |
| | | CTGAGAGAGGCCGGAATCAGAGCCCTCGAGCAGGGCCTGACCAAGATCGA |
| | | CAGAGACACCCTGAAAGAGGTGGCCCAAGAGTACAAGTGA |
| | | (SEQ ID NO: 104) |
| | TniQ | ATGGACGAGATCCAGCCTTGGCTGTTCGCTATCGCTCCTCTGGAAGGCGA |
| | | GAGCCTGTCTCACTTCCTGGGCAGATTCAGAAGAGAGAACGACCTGAGCG |
| | | CCTCCATGCTGGGAAAAGAGGCCGGAATTGGAGCCGTGGTGGCCAGATGG |
| | | GAGAAGTTCCACCTGAATCCATTTCCAAGCCGGAAAGAGCTGGAAGCCCT |
| | | GGCCAAAGTGGTGCAGGTCGACAGCGATCGGCTGAGAGAAATGCTGCCTC |
| | | CTGAAGGCGTGGGCATGAAGCACGAGCCTATCAGACTGTGCGGCAGCTGC |
| | | TATGCCCAGTCTCCTTGCCACAAGATCGAGTGGCAGTTCAAGACCACACA |
| | | GAGATGCGACCGGCACAAGCTGACACTGCTGAGCGAGTGCCCTAACTGCA |
| | | AGGCCAGATTCAAGATCCCCGCTCTGTGGGCCGATGGCTGGTGCCACAGA |
| | | TGCTTTACCACCTTCGCCGAGATGAGCAAGAGCCACAAAGAACTCGTGTG |
| | | A |
| | | (SEQ ID NO: 105) |
| | LE | CCGTACTGAGTCTATTCGTTGACTCGAGAGGATCTAAACGAGATCAATTT |
| | | TTCACAAAGACACATAATTTGACTCCACAACAAATAATGTGTCAGTGTAC |
| | | ATGTCGATTGCCAAATTATATGTCGTCTTGTCAAATTAATTGACATGATA |
| | | AATTTTAAGCCTGTAATCCTCACGAATCATAGATTACAGGCTATTTTAGC |
| | | ATCTTTCACTTCATTGAATACTAATTGACAAATTAAATGTCTTATCTTGG |
| | | GAAATTGACAAATTAAATGTCCAAGTTTGGAAATTAAGATTTTTATCATC |
| | | TTTGACAGATTGTTTGTCATTACCAGTATAATTGTACTATGTTGCAATTA |
| | | AACAGTAATGTTGGAATATGGCGACAGATAACCCTAATGCCTCTGGAATT |
| | | GTGACCGAACTCTCGCATGAGGCGAAACTGAAGCTAGAAATTATTGAGAG |
| | | TTTGCTGGAACCGTGCGATCGCCAAACCTACGGGGAACGTCTCAAAGATG |
| | | (SEQ ID NO: 106) |
| | RE | TAGATGCCCAGTCGCCATTTAATTTGAAGCCTGGGTTTCAACTACCATCC |
| | | CAACTAGGGGTGGGTTGAAAGTTACCTTTAGGCAAGCAAATTTTTCTAAA |
| | | GCGATCAGTTAGACACTCTGAAAAATTACAAATGATAGGATGGATTGAAA |
| | | GGAGCATCGGACTCTTAACTTTGTATGTAAGATTGCAGCTAATTGTCCAA |
| | | TGGCTGTTAGAAAGAGACGCTTAATTTGTCACTGTTATTTAAAAGACACT |
| | | AATTTGTCAAAACGACATTAATTTGACAACGACGACAAATAATGTGGCAA |
| | | TCGACAACAAGATGGGTAACCAGGGGCTCGAACCCTGAACCAACGGATTA |
| | | AGAGTCCGATGCTCTACCATTGAGCTAGTCACCCTTAGAAAAACTATTAT |
| | | AACAGATTTTAATAAATTAAGTAAACTATTTACTAAAAATTTTTGATTAA |
| | | CCGATCGCTAATTTATTCGGGATACTATACATATCATGCTCCCGATTTGC |
| | | (SEQ ID NO: 107) |
| CP003630/ | TnsB | ATGAGCCAGGACAGCCAGAGATTCTTCAGCCCTCACGAGGGCAACAAGCC |
| Microcoleus | | CACCGAGCTGCAGAGAACCAGCAAGAACCCTGCCAAGAGCCACAGACTGC |
| sp. PCC | | CTAGCGACGAGCTGATCACCGATGAAGTGCGGCTGCGGATGGAAATCATC |
| 7113/T49 | | CAGAGACTGACCGAGCCTTGCGACAGAAAGACCTACGGCATCCGGAAGAG |
| | | AGAGGCCGCCGAAAAGCTGGGAGTGACCCTGAGATCCATCGAGCGGCTGC |
| | | TGAAGAAGTACCAAGAGCAGGGACTCGTGGGCCTGACACAGACCAGATCT |
| | | GACAAGGGCCAGAGAAGAATCAGCGCCGACTGGCAAGAGTTCATCGTCAA |
| | | GACCTACAAAGAGGGAAACAAGGGCAGCAAGCGGATGCTGCGGAACCAGG |
| | | TGTTCCTGAGAGTGAAGGGCAGAGCCAAGCAGCTGGGCCTGAAGCCTGAG |
| | | GAATACCCTAGCCACCAGACCGTGTACCGGATCCTGGACGAGTACATCGA |
| | | GGGCAAAGAGCGGAAGCGGAACGCCAGATCTCCTGGCTATCTGGGCAGCA |
| | | GACTGACCCACATGACCAGAGATGGCCAAGAGCTGGAAGTGGAAGGCAGC |
| | | AACGATGTGTGGCAGTGCGACCACACCAGACTGGACATCAGAATCGTGGA |
| | | TGAGTACGGCGTGCTGGACAGACCTTGGCTGACCGTGATCATCGACAGCT |
| | | ACAGCAGATGCCTGATGGGCTTCTTCCTGGGCTTTTTCGCCCCTAGCAGC |
| | | CAGATCGATGCCCTGGCTCTGAGACACGCCATCCTGCCTAAGTTCTACGG |
| | | CAGCGAGTATGGCCTGGGCGACAAAGAGTTTGGCACCTACGGAATCCCCA |
| | | GCTACTTCTACACCGACGGCGGCAACGACTTCCAGAGCATCCACATCACA |
| | | GAACAGGTGGCCGTGCAGCTGGGATTCTCTTGTGCCCTGAGAAGAAGGCC |
| | | AAGCGACGGCGGAATTGTGGAACGGTTCTTCAAGACCCTGAACGACCAGG |
| | | TGCTGAGAAACCTGCCTGGCTACACCGGCTCCAATGTGCAAGAAAGACCC |
| | | GACGACGTGGACAAGGACGCCTGTCTGACACTGAAGGACCTGGATATCAT |
| | | CCTCGTGCGGTACATGGTCAAAGAGTACAACGGCCACACCGACGCCAGAT |
| | | TCATCGTGAAAGAGTATAACGCCGACGACACCGACGTGAAGCTGAACGCC |
| | | CAGACACGGTTCATGAGATGGGAGGCCGGACTGATGATCGAGCCTCCTCT |
| | | GTACGATGAGCTGGACCTCGTGATCGCCCTGATGAAGGCCGAGAGAAGGA |
| | | CCGTGGGCAAATACGGCACCCTGCAGTTTGAGAGCCTGACCTACAGAGCC |
| | | GAGCACCTGAGAGGCAGAGAAGGCAAAGTGGTGGCCCTGAGATACGACCC |
| | | CGACGACATCACCACCATCTTCGTGTATCAGATCCACGAGGACGGCACCG |
| | | AGGAATTTCTGGACTACGCCCATGCTCAGGGCCTCGAGGTGGAAAGACTG |
| | | AGCCTGAGAGAGCTGCAGGCCATCAAGAAGCGGCTGAGAGAAGCCCGGGA |
| | | AGAGATCAACAGCGAGACAATCCAGGCCATGCTGGAACGGGAAGAGTGGA |
| | | CCGAGGAAACCATCAAGCGGAACCGGCAGCAGCGGAGAAAAGCCGCTCAC |
| | | GAGCTGGTCAATCCTGTGCAGAGCGTGGCCGAGAAGTTCGGCATCGTGGA |
| | | ACCTCAAGAGGCCGACTCTGAGGCCGAGGAAGAACTGGAAGCCGAGCTGC |
| | | CTAGATACAAGGTGCAGTACATGGACGAGCTGTTCGACGACGACTGA |
| | | (SEQ ID NO: 108) |
| | TnsC | ATGCCCTACCACATCTGGATGTACGAGCTGCTGCTGAGCAGAATGACCGG |
| | | CCTGCTGCTGGGCGAGTCTAGATCTGGCAAGACCGTGACCTGCAAGACCT |
| | | TCACCAACCGGTGCAACCAGCAGGCCAAGACCAAGGACAAGCGCGTGATG |
| | | CCCGTGATCTACATTCAGATCCCCAAGAACTGCGGCAGCCGGGACCTGTT |
| | | CATCAAGATCCTGAAAGCCCTGGGCCACAGAGCCACCAGCGGCACAATTA |
| | | CCGACCTGAGAGAGAGAACCCTGGACACCCTGGAACTGTTTCAGGTGCAG |
| | | ATGCTGATCATCGACGAGGCCAACCACCTGAAGCTGGAAACCTTTAGCGA |
| | | CGTGCGGCACATCTACGACGACGACAATCTGGGCCTGAGCGTGCTGCTCG |
| | | TGGGCACCACAAATAGACTGACCAGAGTGGTGGAACGGGACGAACAGGTG |
| | | GAAAACCGGTTCCTGGAAAGATACCAGCTGGACAAGATCAACGACAAAGA |
| | | GTTCCAGCAGCTGGCCAAAATCTGGGTGCAAGACGTGCTGGGCATGAGCG |
| | | AGGCCAGCAATCTGATCAAGGGCGAGACACTGCGGCTGCTGAAGAAAACC |
| | | ACCAAGCGGCTGATCGGCCGGCTGGACATGATTCTGAGAAAGGCCGCCAT |
| | | CAGAAGCCTGCTGAAGGGCTACGAAACCCTGGATGCCGAGGTGCTGAAAC |
| | | AGGTGGCCAAGAGCGTGAAGTGA |
| | | (SEQ ID NO: 109) |
| | TniQ | ATGGACGAGCTGGAAACCCAGCTGTGGCTGAACAGAGTGGAACCCTACGA |
| | | GGGCGAGAGCATCAGCCACTTTCTGGGCAGATTTCGGAGAGCCAAGGGCA |
| | | ACAAGTTCAGCGCCCCTTCTGGCCTGGGAAAAGTGGCAGGACTGGGCGTC |
| | | GTGCTCGTCAGATGGGAGAAGCTGTACCTGAATCCATTTCCAACCAGGCA |
| | | GCAGCTGGAAGCCCTGGCCGATGTGGTTATGGTGGACGCCGATAGACTGG |
| | | CCCAGATGCTGCCTCCTAAGGGCGTGACCATGAAGCCCAGACCTATCCTG |
| | | CTGTGCGCCGTGTGCTATGCCGAGAATCCCTACCACAGAATCGAGTGGCA |
| | | GTTCAAAGAGAGATGGGGCTGCGACGGCAGAAGCGCCAATAGACTGAGAC |
| | | ACAGACACCAGCTGCCTCTGCTGGGCAAGTGCATCAACTGCGAGACACCC |
| | | TTTCCTATACCTGCTCTGTGGGTGGAAGGCGAGTGCCCTCACTGCTTTCT |
| | | GCCCTTTGCCAGAATGGCCAAGCGGCAGAAGTCCAGAAGGGCCTAA |
| | | (SEQ ID NO: 110) |
| | LE | TACTATACAAATACGTTAAGGTATTAATCTCCCAAAAGACACACTATAAA |
| | | AAAGACTTCTCAGCGACTGAACGCTAGAAGCCTTCCGTTGATTTATTCTT |
| | | GTACATTCACAAATTAAATGTCGTTATTTAACAAATTAATGTCGTAGAAA |
| | | GATTAGCGCGTAATCTACATTCTACAAGGGTTTCAGTGACTTTCAATCTT |
| | | AACTAAGGTGAACGTCCGCATTTAACATTTTATACGTCGCAATTTAGTAC |
| | | CTTTAACAATTTATATGTCGGTTATTGGCTAAAACTTCAATTTGAATCTT |
| | | AACTAGACTTCACAAATTGTTTGTCGCATTTTAGGGCAAGCCAGACTATC |
| | | ATTTGGACAGCGGTTAGTACATTGGTTCTGTTTGTTGCTTACTGCTCACT |
| | | CTATTATGTGGAACTCTCGCATCACGTATGTAGGTGAAGAATGTCTCAGG |
| | | ATTCACAACGTTTTTTTTCTCCGCATGAAGGTAATAAGCCAACTGAACTT |
| | | (SEQ ID NO: 111) |
| | RE | TTCATCACCCCTCCCGCCTTGGGATGGGTTGAAAGTCTGTGTTACCTTAT |
| | | TTCCTGGAATTTGTAGGGAAGGTTGAAAGGCGCACTTCGTTCGGGATTAT |
| | | TCTGATAGGATTAAATATTCTCAACACAATGAGAGGGTAACTTTCTTACT |
| | | TCATTTTCCACGTTCAGAAGTTTAGCGACAATAATTTGTTAACAGTTGCC |
| | | TAGAAGCAAAGTCGCCGTAACAGCGACGTGAATTTGTTAAAAACGACATC |
| | | AATCTGTTAATAGCGACATTTAATTTGTGAATGTACAACAATTATAATCG |
| | | GGATGACAGGATTTGAACCTGCGACCCCTTCGTCCCGAACGAAGTGCGCT |
| | | ACCAAGCTGCGCTACATCCCGATAAGTTATAGCCGTAACTCATCTATGGT |
| | | ATCACATTGTATCGGCAATCAGCCGCCAGCTTGCTAGGATAATCACTGTA |
| | | ACTTCAGTGGGAGCTGGGCTGGGAGTGGTCGTTAAACCAGAATGGTTGCG |
| | | (SEQ ID NO: 112) |
| CP003659/ | TnsB | ATGTACATGCGGAACGAGACACCCCTGACACCTGGCAACCTGGGAGATGA |
| Anabaena | | GAGCAGCATCGGCAAAGAAACCCAGGTGCTGGTGTCTGAGCTGAGCGGAG |
| cylindrica | | AGGCCAAGCTGAAGATGGAAGTGATCCAGAGCCTGCTGGAAGCCGGCGAC |
| PCC 7122/ | | AGAACAACATACGCCCAGAGACTGAAAGAGGCCGCCGTCAAGCTGGGAAA |
| T50 | | GTCTGTGCGGACAGTGCGGCGGCTGATCGACAAGTGGGAAGAAGAGGGAC |
| | | TCGTCGGCCTGACACAGACCGAGAGAGTGGATAAGGGCAAGCACAGAGTG |
| | | GACGAGAACTGGCAAGAGTTCATCCTCAAGACCTACAAAGAGGGCAACAA |
| | | AGGCGGCAAGCGGATGAGCAGACAGCAGGTCGCCGTCAGAGTGAAAGTGC |
| | | GGGCTGATGATCTGGGCGTGAAGCCTCCTAGCCACATGACCGTGTACCGG |
| | | ATCCTGGAACCTGTGATCGAGAAGCAAGAGAAGGCCAAGAGCATCAGAAG |
| | | CCCCGGCTGGCGAGGAAGCAGACTGAGCGTCAAGACCAGAGATGGCAAGG |
| | | ATCTGCAGGTCGAGTACAGCAATCAAGTGTGGCAGTGCGACCACACCAGA |
| | | GCCGATGTGCTGCTGGTGGATAAGCACGGCGAGATCCTTGGCAGACCTTG |
| | | GCTGACCACCGTGATCGACAGCTACAGCAGATGCATCGTGGGCATCAACC |
| | | TGGGCTACGATGCCCCTAGTTCTCAGGTGGTGGCTCTGGCCCTGAGACAC |
| | | GCCATTCTGCCTAAGCAGTACGGCCAAGAGTACGAGCTGTACGAGGAATG |
| | | GGGCACCTACGGCAAGCCCGAGCACTTTTACACAGACGGCGGCAAGGACT |
| | | TCAGAAGCAACCATCTGCAGCAGATCGGCGTGCAGCTGGGCTTTGCCTGT |
| | | CACCTGAGAGACAGACCTAGCGAAGGCGGCATCGTGGAAAGACCCTTCAA |
| | | GACCTTCAACACCCAGCTGTTCAGCACACTGCAGGGCTACACCGGCAGCA |
| | | ACGTGCAAGAAAGACCTGAGGAAGCCGAGAAAGAAGCCTGTCTGACCCTG |
| | | AGAGAGCTGGAACAGAGACTGGTGGCCTACATCGTGAACACCTACAACCA |
| | | GCGCGAGGACGCCAGAATGGGCGATCAGACCAGATTTCAGAGATGGGACA |
| | | GCGGCCTGATCGTGGCCCCTGAAGTGATCAGCGAGAGAGATCTGGACATC |
| | | TGCCTGATGAAGCAGAGCCGGCGGATGATTCAGAGAGGCGGCTACCTGCA |
| | | GTTCGAGAACCTGATGTACAAGGGCGAGCACCTGGCCGGATATGCCGGCG |
| | | AATCTGTGGTGCTGAGATACGACCCCAGAGACATCACCACCATCCTGGTG |
| | | TACTCCCACAAGGGCCACAAAGAGGAATTTCTGGCCAGGGCCTACGCTCA |
| | | GGACCTGGAAACAGAGGAACTGAGCCTGGATGAGGCCAAGGCCATGATCA |
| | | GACGGATTAGAGAGGCCGGCAAGACCATCAGCAACCGGTCTATGCTGGCC |
| | | GAAGTGCGGGACAGAGAAACCTTCGTGAAGCAGAAAAAGACCAAGAAAGA |
| | | GCGGCAGAAAGAGGAACAGGCCGTCGTCCAGAAAACAAAAAAGCCCGTGC |
| | | CTGTGGAACCCGTGGAAGAGATCGAGGTGGCCTTCGTGGAATCCAGCCAA |
| | | GAAACCGACATGCCCGAGGTGTTCGACTACGAGCAGATGAGAGAAGATTA |
| | | CGGCTGGTGA |
| | | (SEQ ID NO: 113) |
| | TnsC | ATGGAACTGGTCGAGGAAGTGAACAAGATCGTCGGCATCAAGACCAAAGA |
| | | GACACTGACCCCAGGCCAGGTGGTCAAGGCCATGATCCTGAATGGCCTGG |
| | | GCTTTCTGAGCGCCCCTCTGTACCTGTTCGGCGAGTTCTTTGTGGGCAAA |
| | | GCCACCGAGCACCTGATCGGAGAAGGCGTGCTGCCCGAACACCTGAACGA |
| | | TGACAAGCTGGGCAGAGAGCTGGACAAGTACCACCAGATCGGCACCACCA |
| | | AGATCTTCACCGCCGTGGCCATTAAGGCCGCTCACAAGTTCCAGGTGGAA |
| | | ATGGACAGCATTCACCTGGACGGCACCAGCATGTCTGTGGAAGGCGAGTA |
| | | CAAGAAAGAGATCAAAGAGATTGACGAGATCAAGCAAGAGACAGAGGAAA |
| | | ACAAGCTGGAAATCGAGCCCGAGATGAAGGCCATCGAGATCGTGCACGGC |
| | | TACAGCAGAGACAAGAGGCCCGACCTGAAGCAGTTCATCATCGACATGAT |
| | | CGTGACCGGCGACGGCGACATCCCACTGTATCTGAAAGTGGACAGCGGCA |
| | | ACGTGGACGACAAGAGCGTGTTCGTGGAACGGCTGAAAGAATTCAAGAAG |
| | | CAGTGGACCTTCGAGGGCATCAGCGTGGCCGATAGCGCTCTGTACACAGC |
| | | CGAAAATCTGGCCGCCATGCGCGAGCTGAAGTGGATCACAAGAGTGCCCC |
| | | TGAGCATCAAAGAGGCCAAGAACAAGATTGTGGATATCAAAGAAGCCGAG |
| | | TGGAAGGACAGCCAGATCAGCGGCTATAAGATCGCCGCCAAAGAGAGCGA |
| | | GTACGCCGGAATCAAGCAGCGGTGGATCATCGTGGAAAGCGAGATCCGGA |
| | | AGAAGTCCAGCATCCAGCAGGTCGAGAAGCAAGTGAAGAAGCAAGAAGCC |
| | | AAGGCCAAGGCTGCCCTGAGCAAGCTGAGCAGACAAGAGTTCGCCTGCCA |
| | | GCCTGACGCCAAGATCGTGATCGAGAAGCTGTCCAAGTCCTGGAAATATC |
| | | ACCAAATCAAAGAAATCGAGTACATTGAGAAGCTCGAGTATAAGACCGCC |
| | | GGCAGACCCTCCAAGCTGACAGAGCCTAGCCAGATTAAGTACCAGATCAA |
| | | GGGCCAGATCGAGACACGGGAAGAAGTGATCGAAACCGAGAAGATCAATG |
| | | CCGGCAGATTCATCCTGGCCACCAACGTGCTGGACCGGAATGAGCTGTCC |
| | | GACGAGAAGGTGCTGGAAGAGTACAAGGCCCAGCAGAGCAACGAGCGGGG |
| | | CTTCAGATTCCTGAAGGACCCTCTGTTCTTCACCAGCTCCGTGTTTGTGA |
| | | AAACCCCTGAGAGAGTGGAAGCCATTGCCATGATTATGGGCCTGTGCCTG |
| | | CTGGTGTACAATCTGGCCCAGCGGAAGCTGAGACAAGAACTGGCCAAGTT |
| | | CGACGACGGCATCCGCAATCAAGTCAAGAAGATCACCAACAAGCCCACCA |
| | | TGAGATGGGTGTTCCAGATGTTCCAGGCCGTGCACCTGGTCATCATCAAC |
| | | GGCCAGAAACAGATGAGCAACCTGACCGAGGAACGCGAGAAGATTGTGCG |
| | | CTACCTGGGCAAGTCCTGCAGCAAGTACTACCTGATCACCTGA |
| | | (SEQ ID NO: 114) |
| | TniQ | ATGGAAGTGGGCGAGATCAACCCATGGCTGTTCCAGGTGGAACCCTACCT |
| | | GGGCGAGAGCCTGTCTCACTTCCTGGGCAGATTCAGACGGGCCAACGATC |
| | | TGACCACAACCGGCCTGGGAAAAGCCGCTGGTGTTGGCGGAGCCATCAGC |
| | | AGATGGGAGAAGTTCCGGTTCAACCCTCCACCTAGCCGGCAGCAACTGGA |
| | | AGCCCTGGCCAAAGTCGTGGGAGTCGATGCCGATAGACTGGAACAGATGC |
| | | TGCCTCCTGCTGGCGTGGGCATGAACCTGGAACCTATCAGACTGTGCGCC |
| | | GCCTGCTACGTGGAAAGCCCTTGTCACAGAATCGAGTGGCAGTTCAAAGT |
| | | GACCCAGGGCTGCCAGCACCACCACCTGTCTCTGCTGAGCGAGTGCCCTA |
| | | ATTGCGGCGCCAGATTCAAGGTGCCAGCTCTGTGGGTTGACGGCTGGTGC |
| | | CAGAGATGCTTCCTGCCTTTCGGCGAGATGATCGAGCACCAGAAGCGGAT |
| | | CTGA |
| | | (SEQ ID NO: 115) |
| | LE | TCTAACGATAACGAATAATGATAAATACCGTAGTGCAATATTATGCTACA |
| | | GGAAACTTAATCAGTGTTTACATAATTTGTGTACATTAACTAATTATTTG |
| | | ACAATTTAACAAAATATTGTCAAAAATCATAAAAATACCTTAAAACCTTC |
| | | TACAGCAAAGATTGTAGGAGGTTTTTATTTATCTAATTTGTGAACATCCT |
| | | CCAGACATATATTTAACAAATTAAGTGTCAAAAGCCAGATAATTATCAAT |
| | | TTATTTGTCAATTTGCCAAATACAGGTAAATTACTATATTTCTGAAAATT |
| | | TCACACATTAAATGTCACTTTTACTCTATACTATACAAATATGTTGTAAT |
| | | TAAACATTAATGTATATGAGGAATGAAACACCTCTAACTCCGGGCAATTT |
| | | GGGAGATGAAAGTAGCATCGGCAAAGAAACTCAAGTTCTTGTGTCGGAAC |
| | | TTTCTGGCGAGGCAAAACTAAAAATGGAGGTTATTCAAAGTCTGTTAGAA |
| | | (SEQ ID NO: 116) |
| | RE | GTTTCAACACCCCTCCCGGAGTGGGGGGGGTTGAAAGACATTAATGCAAG |
| | | TAGAATAAAAAATATCTAGGTGGGTTGAAAGATCAGTAGGTCGTGGGTTT |
| | | AACTCTGAAAACACTTGAAAACACTATATAAATACAGTGTTGCTTGTGAC |
| | | ATTTAGGGACAATTAATTTGTTAACAGTGACACGAATTAGTTAAAAATGA |
| | | CATTAATTTGTTAACAGTGACAAATAAATTGTTAATGTACAGACATATAG |
| | | TGTGCGAATGTACACCAAAGCCGATGATGGGATTTGAACCCACGACCTAC |
| | | TGATTACGAATCAGTTGCTCTACCCCTGAGCCACATCGGCATACACAGTT |
| | | TGATATCATAGCATTATTTACCTATGATAGACCCAAATTCCCAAAATCGT |
| | | CTTAACTCTAAACAATATGCCCACCTGAAAGCTGAAATAGCAGCCCCTTA |
| | | TCGTGGTTTGCGGCAATTTATCTATATAGGTGTTGGTGCTTCTGGTTTTA |
| | | (SEQ ID NO: 117) |
| LJOS01000 | TnsB | ATGAACCGGGACGAGAACAGCGACCTGAACACCAGCGCCATTCCAGTGGA |
| 007/ | | ATCCATCAGCGAGGGCGACAACACCCCTCCTGAGACAAATGTGATCGCCA |
| Anabaena | | CCGAGCTGAGCGAGGAAAGCCAGCTGAAACTGGAAGTGCTGCAGAGCCTG |
| sp. WA113/ | | CTGGAACCCTGCGACAGAACAACCTACGGCCAGAAGCTGAAAGAGGCCGC |
| T51 | | CGAGAAACTGGCTGTGTCTGTGCGAACAGTGCAGCGGCTGGTCAAGAAGT |
| | | GGGAGCAAGACGGACTCGTGGGCCTGACACAGACCGGCAGAACAGATAAG |
| | | GGCAAGCACCGGATCGGCGAGTTCTGGGAAGATTTCATCGTGAAAACCCA |
| | | CAAAGAGGGCAACAAGGGCAGCAAGCGGATGAGCCCTAAACAGGTGGCCA |
| | | TCAGAGTGCAGGCCAAGGCTCACGAGCTGTCCGATCTGAAGCCTCCTAAC |
| | | TACCGGACCGTGCTGAGAGTGCTGGCCCCTATCCTGGAAAAGCAAGAAAA |
| | | GACCAAGAGCATCAGAAGCCCCGGCTGGCGGGGAACAACACTGAGCGTGA |
| | | AAACAAGAGAAGGCAAGGACCTGAGCGTGGACTACAGCAACCACGTGTGG |
| | | CAGTGCGATCACACCCCTGCTGATGTGCTGCTGGTGGATCAGCATGGCGA |
| | | GCTGCTGTCTAGACCTTGGCTGACCACCGTGATCGACACCTACAGCAGAT |
| | | GCATCATGGGCATCAACCTGGGCTTCGACGCCCCTAGCTCTGAAGTGGTT |
| | | GCTCTGGCCCTGAGACACGCCATCCTGCCTAAGAGATACAGCCTCGAGTA |
| | | CAAGCTGCACTGCGAGTGGGGCACATACGGCAAGCCTGAGCACTTCTACA |
| | | CCGACGGCGGCAAGGACTTCAGAAGCAACCACCTGTCTCAGATCGGCGCT |
| | | CAGCTGGGCTTTGTGTGCCACCTGAGAGACAGACCTAGCGAAGGCGGCAT |
| | | CGTGGAAAGACCCTTCAAGACCCTGAACGATCAGCTGTTCAGCACCCTGC |
| | | CTGGCTACACCGGCAGCAATGTGCAAGAAAGACCCGAGGATGCCGAGAAG |
| | | GACGCCAAGCTGACACTGAGAGAGCTGGAACAGCTCATTGTGCGGTACAT |
| | | CGTGGACCGGTACAACCAGAGCATCGACGCCAGAATGGGCGACCAGACCA |
| | | GATTCGGAAGATGGGAAGCCGGCCTGCCTTCTGTGCCTGTGCCTATCGAG |
| | | GAACGCGACCTGGACATCTGCCTGATGAAGCAGTCTCGGCGGAGAGTGCA |
| | | GAAAGGCGGCCATCTGCAGTTCCAGAACCTGATGTACCGGGGCGAGTACC |
| | | TCGGCGGCTATGATGGCGAAACCGTGAACCTGCGGTTCAACCCCAGAGAC |
| | | ATCACCACCGTGCTGGTGTACCGGCAAGAGAACAGCCAAGAGGTGTTCCT |
| | | GACCAGGGCTCATGCCCAGGGACTCGAGACAGAACAGCTGTCCCTGGATG |
| | | AAGCCGAGGCCGCATCTCGGAGACTGAGAAATCTGGGCAAGACCATCAGC |
| | | AATCAGGCCCTGCTGCAAGAGGTGCTGGACAGAGATGCACTGGTGGCCAA |
| | | CAAGAAGTCCCGGAAGGACAGACAGAAGCTCGAGCAAGAGATCCTGAGAA |
| | | GCACCGCCGTGAACGACAGCAAGAACGAGTCTCTGGCTAGCCCCGTGATG |
| | | GAAGCTGAGGACGTGGAATTCACCACACCTGTGCAGAGCAGCAGCCCCGA |
| | | GCTGGAAGTGTGGGATTACGAGCAGCTGCGGGAAGAGTACGGCTTCTGA |
| | | (SEQ ID NO: 118) |
| | TnsC | ATGACCGATGACGCCCAGGCCATTGCCAAACAGCTCGGCGGAGTGAAGCC |
| | | CGACGAAGAATGGCTGCAGGCCGAGATCACACACCTGACCAGCAAGAGCA |
| | | TCGTGCCCCTGCAGCAAGTGATCACCCTGCACGATTGGCTGGACGGCAAG |
| | | AGAAAGGCCAGACAGAGCTGTAGAGTCGTGGGCGAGAGCAGAACCGGAAA |
| | | GACCGTGGCCTGTGACGCCTACCGGTACAGACACAAGCCCAGACAAGAGA |
| | | TGGGCAAGACCCCTATCGTGCCCGTGGTGTACATCCAGCCTCCATCTAAG |
| | | TGCGGCGCCAAGGACCTGTTCCAAGAGATCATCGAGTACCTGAAGTTCAA |
| | | GGCCACCAGAGGCACCATCAGCGACTTCAGAGGCCGGACCATGGAAGTGC |
| | | TGAAGGGCTGCAGAGTGGAAATGATCATCATCGACGAGGCCGACCGGATC |
| | | AAGCCCGATACCTTTGCTGACGTGCGGGACATCTACGACAAGCTGGGAAT |
| | | CGCCATCGTGCTCGTGGGCACCGATAGACTGGAAGCCGTGATCAAGCGGG |
| | | ACGAACAGGTGTACAACCGGTTCAGAGCCTGCCACAGATTCGGCAAGCTG |
| | | GCCGGCAAGGACTTCCAGGATACAGTGCAGGCCTGGGAAGATAAGATCCT |
| | | GAAGCTGCCCCTGCCTAGCAACCTGATCTCCAAGGACATGCTGCGGATCC |
| | | TGACAAGCGCCACCGAGGGCTATATCGGCGGACTGGATGAGATCCTGAGA |
| | | GAGGCCGCCATCAGAAGCCTGTCCAGAGGCCTGAAGAAAATCGACAAGGC |
| | | CGTGCTGCAAGAGGTGGTGCAAGAGTTCAAGCTGTGA |
| | | (SEQ ID NO: 119) |
| | TniQ | ATGATCCAGCCTTACGAGGGCGAGAGCCTGAGCCACTTCCTGGGCAGATT |
| | | CAGAAGGGCCAACCACCTGTCTGCTGCCGGCCTGGGAAATCTGGCTGGAA |
| | | TCGGAGCCGTGATCGCCAGATGGGAGAGATTCCACTTCAACCCCAGACCT |
| | | AGCCAGAAAGAGCTGGAAGCCATTGCCAGCGTGGTGGAAGTGGATGCCCA |
| | | GAGACTGGCCGAAATGTTGCCTCCTGCTGGCGTGTCCATGCAGCACGAGC |
| | | CTATTAGACTGTGCGGCGCCTGTTACGCCGAGACACCTTGTCACCAGATC |
| | | AAGTGGCAGTTCAAAGAGACAGGCGGCTGCGACCGGCACTACCTGAGACT |
| | | GCTGAGCAAGTGCCCTAACTGCGACGCCAGATTCAAGATCCCCGCTCTGT |
| | | GGGAGCTGGGCGTGTGTCAGAGATGCCTGATGACCTTTGCCGAGATGGCC |
| | | GGCTACCAGAAGTCCATCAACGGCACCTAA |
| | | (SEQ ID NO: 120) |
| | LE | TTTAAGTATAGTAGTATTATCAAGGGTAAAAATGTCAACATTTCATAATA |
| | | TCTTCCATCCAATGAACATAACTGATTTGTTGACACATACAAGATTGAAG |
| | | ATAGCGGAATTTATCTAACATCTTTTCACCCCATTCTTTCGGAACAGATA |
| | | AATGTACAGTGACTAATTATATGTCATCGTGACAAATTAATGTCATCTTA |
| | | TAAATCCTTGCTGTAGAAGGATTTTAGCAATTTAACGATATTATACTTCA |
| | | ATCCAGTTAGTGACAAAATAAATGTCGTTTCCCATGATTGTGACAAATTA |
| | | ACTGTCGCGTTACCGATTAAAAAAAGTTTTTGTATATTTTCATAATGACA |
| | | AATTGACTGTCGCTTTCCAGTAAGCTAGAATAACATCATGTTTTTATAAA |
| | | ATCTGTTTGATTTATGAACAGAGATGAAAATTCTGATTTAAATACCTCAG |
| | | CTATCCCTGTGGAAAGCATATCAGAAGGAGACAACACACCTCCTGAGACA |
| | | (SEQ ID NO: 121) |
| | RE | GGTAACAACAACCCACCCTATGGTGGGTTGAAAGGTTATCATATTCTTAT |
| | | AAAAAGAGGGTTGAAAGAGAGTACATCGTTGACATATCGCTCTGATATAT |
| | | CAATAAATGACATTAATTTGTCACTACCATTAAAACGACAACAATTTGTC |
| | | CTAACGACACTAAATTGTCACCGACGACATATAATTAGTCACTGTACAAA |
| | | AAGTATGGACGGTATTGGACTCGAACCAACGACCCCATCGATGTCAACGA |
| | | TGTACTCTAACCACCTGAGCTAACCGTCCTTAATCCCATAGACTAATAAC |
| | | GTATCACATAAAATATAATTTGTCAATCCCTAAAATCCAAATTTTATTCT |
| | | ACATATATCTAGTCAACTGTACCCGATAGCGATCCTTTTTTGTCACCGCA |
| | | ATTTCCCCAACTTCCAACCGACCTTTTCCCCGAATAGCGATTAAATCCCC |
| | | TGTTTTCACTTGAGAACTGGCTTGAGTGACTTCCTTCCAATTGACACGCA |
| | | (SEQ ID NO: 122) |
| PEBC01000 | TnsB | ATGACCATCGACAACCAGTTCAGCGACAGCCCCGAGCTGATTAGCCAGCT |
| 041/ | | GTCTCCCGAGGACCAGAAAATCGCCGACGTGATCGAGAACCTGCTGCAGC |
| Cyanobacterium | | CCTGCGACAAGAAAACCTACGGCAAGAAGCTGAAGCAGGCCAGCGACCAG |
| aponinum | | CTGAAGAAAAGCGTGCGGACCATCCAGAGATACGTGAAGCAGTGGGAAGA |
| IPPAS B- | | GAACGGCCTCGTGGGCATCCTGCAGAACAACAGAGCCGACAAGGGCAGCT |
| 1201/T52 | | ACCGGATCGACCCTAGACTGCAGGACTTCATCCTCAAGACCTACAGAGAG |
| | | GGCAACAAGGGCTCCAAGCGGATGACCCCTAAACAGGTGTACCTGAGAGC |
| | | CGTGGTGCAGGCCGAGAATTGGGGAATCAAGCCTCCTAGCCACATGACCA |
| | | TCTACCGGATTCTGAACCCCATCATTGCCGAGAAAGAGAACAAGAAGCGG |
| | | ATCAGAAGCAGCGGCTGGCGGGGATCTCAACTGGTGCTGTCTACAAGATC |
| | | CGGCACCGAGATCGACGTGCAGTACAGCAATCACGTGTGGCAGTGCGACC |
| | | ACACCAGAGCCGATATCCTGCTGGTGGATCAGTTCGGCGAACTCCTGGGC |
| | | AGACCCTGGATCACCATTGTGGTGGACACCTACAGCCGGTGCATCATGGG |
| | | CATCAACCTGGGCTTTGATGCCCCTAGCAGCCAGGTTGTGACACTGGCCC |
| | | TGAGACACGCCATCCTGCCTAAGAGCTACAGCAGCGACTACGAGCTGCAC |
| | | GAGGAATGGGGCACATACGGCAAGCCCGAGTACTTCTACACCGACGGCGG |
| | | CAAGGACTTCAGAAGCAACCATCTGCAGCAGATCAGCCTGCAGCTGGGCT |
| | | TCACCTGTCACCTGAGAAGCAGACCTAGCGAAGGCGGCGTGGTGGAAAGA |
| | | CTGTTCAAGACCCTGAACACAGAGGTGTTCAGCACCCTGCCTGGCTACAC |
| | | AGGCGCCAATGTGCAAGAAAGACCCGAGGACGCCGAAAAAGAGGCCTGTC |
| | | TGACCCTGAAAGAGCTGGAAATCCTGATCGTGCGGTACATCGTGGACAAC |
| | | TACAACCAGCGGATCGACGCCAGAATGGGCGAGCAGACCAGATTCCAGAG |
| | | ATGGGAGAGCGGCCTGCTGAGCACCCCTCACATTATCCCTGAGCGCGAGC |
| | | TGGACATCTGCCTGATGAAGCAGTCCAGACGGAAGGTGCAGAAAGGCGGG |
| | | CATCTGCAGTTCGAGAATCTGATCTACAAGGGCCAGTACCTGGCCGGCTA |
| | | TGAGGGCGAGACAGTGATCCTGAGATACGACCCCAGAGACATCACCGGCA |
| | | TCCTGATCTATCGCGTCGAGAACAACAAAGAGATCTTCCTGACCAGAGCC |
| | | TACGCCACCGACCTGGAAGGCGATTGTCTGAGCCTGACCGATGCCAAGAG |
| | | CAGCGTGAAGAGAATCCGCGAGAAGTCCAAGAACGTGCACAACAAGTCCA |
| | | TCCTGATGGAAATCCAGCAGCGGCACCTGTTCAGCGAGAAGAAAACAAAG |
| | | AAGCAGATTCAGCAAGAGGAACAGAAACAGATCAAGCCCAACACCAGCCT |
| | | GAGCATCTTCAAGCCCGAAACCGAGATGGACACCCAGGTGGAAAGCAGCC |
| | | AAGAGCTGAGCGAAGAGGACCTGGACATCGAGATGATCGACTACGGCAAC |
| | | CTGCAGCAGTACTGA |
| | | (SEQ ID NO: 123) |
| | TnsC | ATGGAAGCCAAAGAGATCGCCCAGCAGCTGGGAGAAGTGGAACAGCCCAA |
| | | TCAGAGCCTGCAGAACGAGCTGGACCGGCTGAGCAAGAAGCAGTTCCTGT |
| | | TCCTGGACCAAGTGAAGATCTACCACCAGTGGCTGAACGAGCGGCTGTTC |
| | | ATGAAGCACTGCTGCAGAGTCGTGGGCGATAGCCACACAGGCAAGACATC |
| | | TAGCAGCCAGGCCTACTGCCTGCGGTACAAGAGCACACAAGAGAGCGGCA |
| | | AGAACCCTATCTTCCCCGTGCTGTACGTGTCCGTGCCTGAGAATGCCACC |
| | | AGCAAGGTGTTCTTCGAAACCAGCATCAAGAGCTTCGGCTACCGGATCAG |
| | | CAAGGGCACCATCAGCGACCTGCGGGAAAGAATGCTGACCCTGCTGAGCC |
| | | GGTGCCAAGTGAAAATGATGATCATTGACGAGGCCGACCGGTGCAAGCCC |
| | | GAGACACTGAGCTACATCCGGGACATCTTCGACCACCTGAACATCTGCAT |
| | | CGTGCTCGTGGGCACCGACAGACTGAACACCGTGCTGAAGAGGGACGAAC |
| | | AGGTGTACAACCGGTTCCTGCCTTGCTACAGATACGGCCTGCTGGACAAA |
| | | GAGAGCCTGATCAAGACCATCAAGATCTGGGAGATCAAGATCCTGAAGCT |
| | | GCCCGTGGCCAGCAATCTGAGCCAGGGCAAGAAGTTCAACATCATCTACA |
| | | GCACCTCCAAGGGCTGCCTGGGCACCATGGATAAGCTGCTGAGAACCAGC |
| | | GCCAGCATGGCCCTGATCAGAGGACTGTCCAAGATCGAGCTGAACATCCT |
| | | GGAAGAGGCCGCTCACCTGTTCAAGGACAAGTGA |
| | | (SEQ ID NO: 124) |
| | TniQ | ATGATCACCAACAGCTTCGACAGCTGGATCCTGATGCTGGACCCTTACCA |
| | | GGGCGAGAGCATCAGCCACTTTCTGGGCAGATTCCGGCGCGAGAATAGCC |
| | | TGACCGTGAACAACCTGGGCAAAGCCACAGAGCTGTACGGCGCCATTGCC |
| | | AGATGGGAGAAGTTCCGGTTCAACCCTCCACCTAGCAGCGAGCAGCTGAA |
| | | GAAACTGAGCGCCATCGTGCAGGTCGAGGTGGCCACACTGCAGACCATGT |
| | | TTCCCAGCGCTCCCATGAAGATGACCCCTATCAGACTGTGCAGCGCCTGC |
| | | TACGGCGAGAAGCCCTACCACAAGATGGAATGGCAGTACAAAGAAATCTA |
| | | CAAGTGCGACCGGCACCAGCTGAAGCTGCTGAGCGAGTGTCCTAATTGCG |
| | | GCGCCAGATTCAAGTTCCCCAGCCTGTGGGTTGACGGCTGGTGCCACAGA |
| | | TGCTTCACCCCTTTCGCCGAGATGAAGCAGCAGAAGGACTGA |
| | | (SEQ ID NO: 125) |
| | LE | ATACAAGAATCAAAAAATTTGAAAATTACAAAGGCTTACGGAGTTTGACA |
| | | AAAGAAAGAGTATTGATTCAAGTTTAAGTAAGATAGTAAGCTCTTGTACA |
| | | GTAACAAATTAAATGACGTGATAACAAATTAGTGTTATCTAAAAATAAGA |
| | | CTCTTCAAATCTTTGCATATCAATAATTATAACTAATTCTTCCCCTAAAA |
| | | CAAGGAGCGATCGCACCTCAAATGGGATTAACAAATTAAGTGTCATCTTC |
| | | CAGAAAAATAACAAATTAAATGTCGTCTTTCTAAAAGGCGATTTTTTGTT |
| | | TTAGGGGTTGTCATTAACAAATTAGATGTCCTAAGATTAGTATAAAACCA |
| | | TTATGATTTTATTAAACAGCTAAGAGAAAACTATGACCATCGATAATCAA |
| | | TTTTCTGATTCTCCAGAATTGATCTCTCAACTTTCTCCCGAAGACCAAAA |
| | | AATCGCTGATGTTATTGAAAATTTACTTCAACCTTGTGACAAGAAAACTT |
| | | (SEQ ID NO: 126) |
| | RE | GTTGAAATAAGACAATACCTTCTATAGGGTTTATAATATTAATAGTGCCG |
| | | TAGATCAAGTTTTCATAACCTCTGTTCTATGAAAAATGAGGAGTAGTTTA |
| | | CTTCTTATAAGAAGTTTGCTTTCTGCTTCTGCTAACTACTTGCCCTGATG |
| | | CTGTCTATCTTAAAGATAGAGAAACTAGGCGCACTCCCAGCAATAAGGGT |
| | | GCAGGTGTACTGCTATAGCGGTTAGCGAATCACTTCCGAGCAAGGAAGAA |
| | | TTCTCTTTGAGAATTGAAAGCGAGTCCCTCCACGTCCTAGTCATTGAATT |
| | | GGCGACATTAATTTGTGATCACGTCATTTAATTTGTTAAGACGACATTAA |
| | | TCTGTTACCGATGACAAATAATTTGTTACTGTACAGCTCTAATCTTTTAG |
| | | AGTTAACTGTTATGACTTTGGAGCTATCTATAATTTATTTACGGGCGTGG |
| | | AGGGACTCGAACCCCCGACCTGCTGATCCGTAGTCAGCCGCTCTAATCCA |
| | | (SEQ ID NO: 127) |
| PGEM0100 | TnsB | ATGTACATGCGGAACGAGACACCCATCACACCCGACAACCTGGAAACCGA |
| 0038/ | | GAGCGTGACCGCCAAGGACACCCAGATCATCGTGTCTGAGCTGAGCGACG |
| Cuspidothrix | | AGGCCAAGCTGAAGATGGAAATCATCCAGAGCCTGCTGGAAGCCGGCGAC |
| issatschenkoi | | AGAACAACATACGCCCAGAGACTGAAAGAGGCCGCCGTCAAGCTGGGAAA |
| CHARLIE- | | GTCTGTGCGGACAGTGCGGCGGCTGATCGACAAGTGGGAACAAGAGGGAC |
| 1/T53 | | TCGTGGGCCTGACACAGACCGACAGAGTGGATAAGGGCAAGCACCGCGTG |
| | | GACGAGAACTGGCAAGAGTTCATCCTGAAAACCTACAAAGAGGGCAACAA |
| | | AGGCGGCAAGCGGATGACCAGACAGCAGGTCGCCATCAGAGTGAAAGTGC |
| | | GGGCAGATCAGCTGGGCGTGAAGCCTCCATCTCACATGACCGTGTACCGG |
| | | ATCCTGGAACCTGTGATCGAGAAGCAAGAGAAGGCCAAGAGCATCAGAAC |
| | | CCCTGGCTGGCGGGGAAGCAGACTGAGCCTGAAAACAAGAGATGGCCTGG |
| | | ACCTGAGCGTGGAATACTCCAACCACATCTGGCAGTGCGACCACACCAGA |
| | | GCCGATATCCTGCTGGTGGATCAGCACGGCGAACTGCTGGCTAGACCTTG |
| | | GCTGACCACCGTGATCGACACCTACAGCAGATGCATCATCGGCATCAACC |
| | | TGGGCTTCGACGCCCCTAGTTCTCAGGTTGTGGCTCTGGCCCTGAGACAC |
| | | GCCATCCTGCCTAAGAAGTATGGCGCCGAGTACGGCCTGCACGAGGAATG |
| | | GGGAACATACGGCAAGCCCGAGCACTTCTTTACCGACGGCGGCAAGGACT |
| | | TCAGAAGCAACCATCTGCAGCAGATCGGCGTGCAGCTGGGCTTTGCCTGT |
| | | CACCTGAGAGACTGTCCTAGCGAAGGCGGCATCGTGGAAAGACCTTTCGG |
| | | CACCCTGAACACCGACCTGTTCTCTACCCTGCCTGGCTACACCGGCAGCA |
| | | ACGTGCAAGAAAGACCTGAGGAAGCCGAGAAAGAAGCCTGTCTGACCCTG |
| | | AGAGAGCTGGAACGGCTGCTCGTCAGATACCTGGTGGACAAGTACAACCA |
| | | GAGCATCGACGCCAGACTGGGCGATCAGACCAGATACCAGAGATGGGAGG |
| | | CCGGACTGATCGTGGCCCCTAACCTGATCAGCGAAGAGGACCTGCGGATC |
| | | TGCCTGATGAAGCAGACCAGGCGGAGCATCTACAGAGGCGGCTACCTGCA |
| | | GTTCGAGAACCTGACATACCGGGGCGAGAATCTGGCCGGATATGCCGGCG |
| | | AATCTGTGGTGCTGAGATTCGACCCCAAGGATATCACCACCATCCTGGTG |
| | | TACCGGCAGACCGGCTTTCAAGAAGAGTTCCTGGCCAGAGCTTACGCCCA |
| | | GGATCTGGAAACAGAGGAACTGTCCCTGGATGAGGCCAAGGCCATGAGCA |
| | | GAAGAATCCGGCAGGCCGGCAAAGAGATCAGCAACAGATCCATCCTGGCC |
| | | GAAGTGCGCGACCGGGAAACCTTCGTGAAGCAGAAAAAGACCAAGAAAGA |
| | | GCGCCAGAAAGAGGAACAAGTCGTCGTCGAGAAGGCCTCCAGCGAGAGAA |
| | | GCAGAACCGCCAAGAAACCCGTGATCGTGGAACCCGAAGAGATCGAGGTG |
| | | GCCAGCGTGGAAAGCAGCAGCGACACAGATATGCCCGAGGTGTTCGACTA |
| | | CGAGCAGATGAGAGAAGATTACGGCTGGTGA |
| | | (SEQ ID NO: 128) |
| | TnsC | ATGATCAGCCAGCAGGCTCAGGGCGTTGCCCAAGAGCTGGGAGACATCCT |
| | | GCCTAACGACGAGAAGCTGCAGGCCGAGATCCACCGGCTGAACAGAAAGA |
| | | GCTTCATCCCTCTGGAACAAGTGAAGATGCTGCACGACTGGCTGGACGGC |
| | | AAGAGACAGAGCAGACAGTCTGGCAGAGTGCTGGGCGAGAGCAGAACCGG |
| | | CAAGACCATGGGCTGTGACGCCTACAGACTGCGGCACAAGCCTAAGCAAG |
| | | AGCCCGGCAAACCTCCTACAGTGCCCGTGGCCTACATCCAGATTCCTCAA |
| | | GAGTGCAGCGCCAAAGAGCTGTTCGCCGCCATCATCGAGCACCTGAAGTA |
| | | CCAGATGACCAAGGGCACCGTGGCCGAGATTAGAGACAGAACCCTGCGGG |
| | | TGCTGAAAGGCTGCGGAGTGGAAATGCTGATCATCGACGAGGCCGACCGG |
| | | TTCAAGCCCAAGACCTTTGCTGAAGTGCGGGACATCTTCGACAAGCTGGA |
| | | AATCGCCGTGATCCTCGTGGGCACCGATAGACTGGATGCCGTGATCAAGC |
| | | GGGACGAACAGGTGTACAACCGGTTCAGGGCCTGCCACAGATTCGGCAAG |
| | | TTTAGCGGCGAGGACTTCAAGCGGACCGTGGAAATCTGGGAGAGACAGGT |
| | | GCTGAAGCTGCCTGTGGCCAGCAATCTGTCTGGCAAGGCCATGCTGAAAA |
| | | CCCTGGGAGAAGCCACCGGCGGCTATATCGGACTGCTGGACATGATCCTG |
| | | AGAGAGAGCGCCATTCGGGCCCTGAAGAAGGGCCTGTCTAAGATCGACCT |
| | | GGAAACCCTGAAAGAAGTGACCGCCGAGTACAAGTGA |
| | | (SEQ ID NO: 129) |
| | TniQ | ATGGAAGTGGGCGAGATCAACCCATGGCTGTTCCAGGTGGAACCCTTCGA |
| | | GGGCGAGAGCATCTCTCACTTTCTGGGCAGATTCAGACGGGCCAACGACC |
| | | TGACAACAACCGGCCTGGGAAAAGCCGCTGGTGTTGGCGGAGCCATCAGC |
| | | AGATGGGAGAAGTTCCGGTTCAACCCTCCACCTAGCCGGCAGCAACTGGA |
| | | AGCCCTGGCCAAAGTCGTGGGAGTCGATGCCGATAGACTGGCCAGAATGC |
| | | TTCCTCCTGCTGGCGTGGGCATGAACCTGGAACCTATCAGACTGTGCGCC |
| | | GCCTGCTACGTGGAAAGCCCTTGTCACAGAATCGAGTGGCAGTTCAAAGT |
| | | GACCCAGGGCTGCGAGGATCACCACCTGTCTCTGCTGAGCGAGTGCCCTA |
| | | ATTGCGGCGCCAGATTCAAGGTGCCAGCTCTGTGGGTTGACGGCTGGTGC |
| | | CTGAGATGCTTCACCCTGTTTGGCGAGATGGTCAAGAGCCAGAACTTCAT |
| | | CGAGAGCCACAACAAGATCTGA |
| | | (SEQ ID NO: 130) |
| | LE | AAGGGGAAAGAGGGAACAGGGAATAGGGAACAGGGAATAGGGAACAGGGA |
| | | ACAGGGAATAGGGAATAGGGAATAGGGTAAAGAGGCAATATTTTTGTACA |
| | | TTAACTAATTATTTGTCAATTTAACAAAATATTGTCACAAAAAATAAAAA |
| | | TTATTGAAACCCTGCTATAACAAGGATCATAGCAGGGTTTAGTTATTATA |
| | | CCTTCTAATCATTTTGTGAAACCTTTTTTAACAAATTAATTGTCAAAAAA |
| | | GGGAAAATTAACAATTTAAGTGTCAATTCCCAAAATCCATGTAAACTACT |
| | | CTACTTCTGAAAATTTCACACATTAAATGTCACTTTTGATTTATAATATA |
| | | CAAATATGTTCCAATTAAACATCAATGTATATGAGGAATGAAACACCTAT |
| | | AACTCCAGACAACTTAGAAACTGAAAGTGTTACCGCCAAAGATACTCAAA |
| | | TCATTGTGTCGGAACTTTCCGACGAGGCGAAACTAAAAATGGAGATTATT |
| | | (SEQ ID NO: 131) |
| | RE | AACACCCCTCCCGGATTGGGGGGGGTTGAAAGACATTTATGCAAGTATAA |
| | | TAAAAAATATCTGGGTGGGTTGAAAGATCAGTAGGTCGTGGGTTTAACTC |
| | | TGAAAACACTATATAAATACAGTGTTGCTTGTGATAGTTAGGGACAATTA |
| | | ATTTGTTAACAGTGACACGAATTAGTTAAAATGACATTAATCTGTTAACA |
| | | GTGACAAATAAATTGTTAATGTACACGAACGTACAACCTAAAGCCGATGA |
| | | TGAGATTTGAACTCACGACCTACTGATTACGAATCAGTTGCTCTACCCCT |
| | | GAGCCACATCGGCGCATACAGTCTAGTATAATAACATAATTTACTAATGA |
| | | TGGAACAAAATTCTCAAAATAATCTTAAACCTCAACAATATCAACGCCTC |
| | | AAAGCCGAAGCAGCCGCACCCTATCGGGGTTTGCGGAAATTTATCTATAT |
| | | CAGCGTCGGTGCATCGGGCTTTATCGGTGCATTCGTCTTCTTCTTTCAAC |
| | | (SEQ ID NO: 132) |
| PVWN0100 | TnsB | ATGGCCGACGAGGAATTCGAGCTGACCGAGGAACTGACCCAGGTGCCAGA |
| 0012/ | TnsC | CAACATCCTGCTGGACAAGCGGAACTTCGTGGTGGACCCCAGCCAGATCA |
| Chlorogloea | | TCCTGGAAACCAGCGACAGACAGAAGCTGACCTTCAACCTGATCCAGTGG |
| sp. CCALA | | CTGGCCGAGTCTCCCAACAGAACCATCAAGAGCCAGCGGAAGCAGGCCGT |
| 695/T54 | | GGCCGATACACTGAATGTGTCCACCAGACAGGTGGAACGGCTGCTGAAGC |
| | | AGTACGACGAGGACCGGCTGATTGAGACAGCCGGAATCGAGAGAGCCGAC |
| | | AAGGGCAAGTACCGGGTGTCCAAGTACTGGCAGGACTTCATCAAGACCAT |
| | | CTACGAGAAGTCCCTGAAGGACAAGCACCCTATCAGCCCCGCCTCTATCG |
| | | TGCGCGAGCTGAAGAGACACGCCATCGTGGATCTGGGACTGAAGCCTGGC |
| | | GACTTCCCTCACCAAGCCACCGTGTACAGAATCCTGGATCCTCTGATGGA |
| | | ACAGCACAAGCGCAAGACCAAAGTGCGGAATCCTGGCAGCGGCAGCTGGA |
| | | TGACAGTGGTCACAAGAGAGGGCCAGCTGCTGAAAGCCGACTTCAGCAAC |
| | | CAGATCATTCAGTGCGACCACACCAAGCTGGACATCCGGATCGTGGACAT |
| | | CCACGGCAGCCTGCTGTCTGACAGACCTTGGCTGACCACCATTGTGGACA |
| | | CCTACAGCAGCTGCGTCGTGGGCTTCAGACTGTGGATCAAGCAGCCTGGC |
| | | AGCACCGAAGTTGCCCTGGCTCTGAGACATGCCATCCTGCCTAAGCACTA |
| | | CCCCGACGACTACCAGCTGAACAAGGCCTGGGAGATCTGGGGCCCTCCAT |
| | | TCCAGTACTTTTTCACCGACGGCGGCAAGGACTTCAGAAGCAAGCACCTG |
| | | AAGGCCATCGGCAAGAAACTGGGCTTCCAGTGCGAGCTGAGGGACAGACC |
| | | TCCTGAAGGCGGCATCGTGGAACGGATCTTTAAGACCATCAACACCCAGG |
| | | TCCTGAAGGATCTGCCTGGCTACACAGGCGCCAACGTGCAAGAAAGACCC |
| | | GAGAACGCCGAGAAAGAGGCCTGCCTGAAAATCCAGGATCTGGATCGGAT |
| | | CCTGGCCAGCTTCTTCTGCGACATCTACAACCACGAGCCTTATCCTAAGC |
| | | AGCCCTGCGACACCAGATGCGAGAGATGGTTCAAAGGCATGGGCGGCAAG |
| | | CTGCCTAGGATCCTGGACGAGAGAGAGCTGGATATCTGCCTGATGAAGGA |
| | | AGCTCAGAGAGTCGTTCAGGCCCACGGCTCCATCCAGTTCGAGAACCTGA |
| | | TCTACAGAGGCGAGTCTCTGAAGGCCTACCGGGGCGAGTATGTGACCCTG |
| | | AGATACGACCCCGACCACATCCTGACACTGTACGTGTACAGCTGCGAGAC |
| | | AGACGACGGCGTGGAAAACTTCCTGGATTACGCCCACGCCGTGAACATGG |
| | | ACACCCACGATCTGAGCGTGGAAGAACTGAAGGCCCTGAACAAAGAGCGG |
| | | AGCAAGGCCAGAAGAGAGCACTTCAACTACGACGCCCTGCTGGCCCTGGG |
| | | CAAGAGAAAAGAACTGGTGGAAGAGTGCAAAGAGGACAAGAAAGAGAAGC |
| | | GGCGGCTGGAACAGAAGCGGCTGAGAAGCACCAGCAAGAAAAGCAGCAAC |
| | | GTGATCGAGCTGCGGAAGATCAGAGCCTCCACCAGCCTGAAGAAGGACGA |
| | | CAGACAAGAGGTGCTGCCCGAGAGAGTGGGCCGCGAGGAAATCAAGATCG |
| | | AGAGAATCGAGCCCCAGCTGCAAGAGGACATCAGCGTGCAGACCGACACT |
| | | CAAGAGGAACAGCGGCACAAGCTGGTGGTGTCCAACCGGCAGAAGAACCT |
| | | GAAGAAAATCTGGTGA |
| | | (SEQ ID NO: 133) |
| | | ATGGCCAGAAGCCAGCTGACCACACAGAGCTTCGTGGAAGTGCTGGCCCC |
| | | TCAGCTGGACCTGAAGGATCAGATCGCCAAGACCATCGACATCGAGGAAC |
| | | TGTTCCGGACCTGCTTCATCACCACCGACAGAGCCAGCGAGTGCTTCAAG |
| | | TGGCTGGACGAGCTGCGGATCCTGAAGCAGTGTGGCAGAGTGATCGGCCC |
| | | CAGAGATGTGGGCAAAAGCAGAGCTGCCCTGCACTACCGGAACGAGGACA |
| | | AGAAACGGGTGTCCTACGTGAAGGCTTGGAGCGCCAGCAGCAGCAAGAGA |
| | | CTGTTCAGCCAGATTCTGAAGGACATCAACCACGCCGCTCCTACCGGCAA |
| | | GAGACAGGATCTCAGACCTAGACTGGCCGGCAGCCTGGAACTGTTTGGCC |
| | | TGGAAATCGTGATCATCGACAACGCCGAGAACCTGCAGAAAGAGGCCCTG |
| | | ATCGATCTGAAGCAGCTGTTCGAGGAATGCCACGTGCCAATCGTGCTCGT |
| | | CGGCGGAAAAGAGCTGGACGATATCCTGCAGGGCTGCGACCTGCTGACCA |
| | | ACTTTCCCACACTGTACGAGTTCGAGCGGCTGGAATACGAGGACTTCAGA |
| | | AAGACCCTGAGCACCATCGAGTTCGATGTGCTGGCACTGCCCGAGGCCTC |
| | | TAATCTCGGCGAGGGCAACATCTTCGAGATCCTGGCCGTGTCCACCAACG |
| | | CCAGAATGGGCCTGCTGGTCAAGATCCTGACAAAGGCCGTGCTGCACAGC |
| | | CTGAAGAACGGCTTCAGCAGAGTGGACGAGAGCATCCTGGAAAAGATCGC |
| | | CAGCAGATACGGCCGGAAGTACATCCCTCTGGAAAACCGGAACCGGAACG |
| | | GCTGA |
| | | (SEQ ID NO: 134) |
| | TniQ | ATGGACGAGGACAACAAGATCCTGCCTAAGCTGGCCTACGTGGAACCCTA |
| | | CATCGGCGAGAGCATCAGCCACTACCTGGGCAGACTGCGGAGATTCAAGG |
| | | CCAACAGCCTGCCTAGCGGCTACAGCCTGGGAAAGATTGCTGGACTGGGC |
| | | GCCGTGATCAGCAGATGGGAGAAGCTGTACTTCAACCCGTTTCCTACACA |
| | | GCAAGAGCTGGAAGCCCTGGCCTCTGTTGTGGGAGTGAACGCCGATAGAC |
| | | TGACCGAGATGCTGCCTCCTAAGGGCATGACCATGAAGCCCAGACCTATC |
| | | AGACTGTGCGGCGCCTGTTATGCCGAGTCTCCCTGCCACAGATTCGAGTG |
| | | GCAGTTCAAGGACATCATGAAGTGCGACGGCTACGCCGGCAGAAGGCACA |
| | | GACACGAACTGAGACTGCTGACCAAGTGCATCAACTGCGAGACACCCTTT |
| | | CCTATACCTGCCGACTGGATCAAGGGCGAGTGCCCTCACTGTAGCCTGCC |
| | | TTTCGCCAACATGGCCAAGCGGCAGAGAAGAGACTGA |
| | | (SEQ ID NO: 135) |
| | LE | TGCCCGGTTGATTAAAGGAAGAACCGACCTATCAAGCGGACACTAATTTG |
| | | TCAAAGCGACATCAATTTGACAACGACGACAAATAATTAGTCAATCGACA |
| | | AATTTTGTACATTCGCACATTATATGTCGCAATTCTCAAGCCAGGTCGTA |
| | | ACTGCTTTTAAAGCCTGAGAACTCAATCGTGTAACCATCGTAGTCTATTT |
| | | ACCTATAAAAGACAAACTAACTTGATTCGCATATTGTACGTCGTAAACGT |
| | | CAGTTTCGCAAATTGATTGTCGTTTATGAAAATTTAGGTGTTTTGCAAAT |
| | | TAGAAGTCGCATTTTTGATAAGATAATGGTACATTAGTACCTTAATTATT |
| | | TACGAGTGGATTTCACTCTAATGGCAGACGAAGAATTTGAACTTACTGAA |
| | | GAATTGACACAAGTTCCGGACAATATTTTACTTGACAAGAGAAATTTTGT |
| | | CGTAGACCCATCGCAAATTATTCTGGAAACTTCGGATAGGCAAAAACTGA |
| | | (SEQ ID NO: 136) |
| | RE | GTTTCAAAGACCATCCCGGCTGGAGGTAAGTTGAAAGAGGCGTGAGTGGT |
| | | GAGGTTCAAAAACTATCCGACCAGGGGTATGTTAGAAGAGAATAGCAATT |
| | | TTTGTTATTGATACTTCACGGATGTATTTTTCAAGGGGAGGGTAGAAAGG |
| | | CGCACTTCGTTCGGGATTATCCTAAAGTTTGTCAGTAAATTATAAAAGTA |
| | | GTGGACTAAACTTCATCTTAAGACAGTCTACGACATCAATTTGCAAAAAC |
| | | TCAGTGTGATTAAATCACATCATTAAAACTACTAAGGCAACATTAATTTG |
| | | CGAGTAACGACACTAATTTGCGAATTGCGACATATAATGTGCGAATGTAC |
| | | AAATTTAAGTCGGGATGACTGGATTCGAACCAGCGACCCCTTCGTCCCGA |
| | | ACGAAGTGCGCTACCAAGCTGCGCTACATCCCGCGAAAAAATGCTTTCAT |
| | | TTCACGCCTTTCTATCCTACACCAAACGCACCAATTCCCGCACTTTTAGA |
| | | (SEQ ID NO: 137) |
| NZ_JRFE01 | TnsB | ATGAACAGCGAGAGCACCAGCGAGACAAACAGCAAGCTGGCCATCAGCGA |
| 000024/ | | CCTGGAAGATGACCGCGAGATCGTGATCACCAGCCAGCTGGAAGGCAAGG |
| Myxosarcina | | CCAAAGAACGGCTGGAAGTGATCCAGAGCCTGCTGGAACCTTGCGACAGA |
| sp. GI1/ | | GCCACATACGGCGAGAGACTTAGAGCTGGCGCCAAGAAACTGGACATCAG |
| T55 | | CGTCAGAAGCGTGCAGCGGCTGTTCAAGAAGTACCAAGAGCAGGGCCTGA |
| | | CAGCCCTGGTGTCCACCAACAGAGTGGACAAGGGCAACAGACGGATCAGC |
| | | AGCTTCTGGCAGGACTTCATCCTGCAGACCTACATCCAGGGCAACAAGGG |
| | | CAGCAAGCGGATGAGCCCTAAACAGGTGGCCATTAGAGTGCAGGCCAAGG |
| | | CCAGCGAGATCAAGGACAACAAGCCTCCTAGCTACAAGACCGTGCTGCGG |
| | | CTGCTGAAGCCCATCCAGAAGAAGAAAGAGCGGACCATCAGAAGCCCTGG |
| | | CTGGCAGGGAACAACCCTGAGCGTGAAAACCAGAGATGGCCAGGACATCC |
| | | AGATCAACCACAGCAATCAAGTGTGGCAGTGCGATCACACCCTGGTGGAT |
| | | GTGCTGCTGGTGGATAGACACGGCGAGCTGATTGGCAGACCTTGGCTGAC |
| | | CACCGTGGTGGACAGCTACAGCAGATGCGTGATGGGCATCAACCTGGGCT |
| | | TCGATGCCCCTAGCTCTCTGGTGGTTGCTCTGGCCCTGAGACACAGCATC |
| | | CTGCCTAAGAACTACTCCCAGGATTTCCAGCTGTACTGCGACTGGGGCGT |
| | | GTTCGGACTGCCTGAGTGCCTGTTTACAGACGGCGGCAAGGACTTCCGGT |
| | | CCAACCATCTGGAAGAGATCGCCACACAGCTGGGCTTCATCCGGAAGCTG |
| | | AGAGACAGACCTAGCGAAGGCGGCATCGTGGAAAGACCCTTCAAGACCCT |
| | | GAATCAGAGCC |
| | | TGTTCAGCACCCTGCCTGGCTACACAGGCAGCAACGTGCAAGAGAGGCCT |
| | | AAGGACGCCGAGAAGGATGCCAGACTGACCCTGAGAGATCTGGAAATGCT |
| | | GATCGTGCGGTTCATCGTGGACAAGTACAACCAGAGCACAATCGCCGGCA |
| | | AGGATGAGCAGACCCGGTATCAGAGATGGGAGGCCGGACTGATCAAGGAT |
| | | CCCAAGATCATCAGCGAGAGAGAGCTGGACATCTGCCTGATGAAGTCTAA |
| | | GCGGCGGACAGTGCAGAGAGGCGGCCATCTGCAGTTCGAGAACATCATCT |
| | | ACCGGGGCGAGTACCTGGCCGGCTATGAGGGCGATATTGTGAACGTGCGG |
| | | TACAACCCCATCAACATCACCACCATCCTGGTGTATCGGCGCGAGCAGGG |
| | | CAAAGAGGTGTTCCTGACAAGAGCCCACGCTCTCGGATGGGAGACAGAGA |
| | | TCCACAGCCTGTCTGAGGCCAGAGCCAGCGTGAAGAGACTGAGACAGGCC |
| | | AAGAAGAAGATCAGCAACGAGTCCATCCACCAAGAGATCCTGCTGAGGGA |
| | | CAGCGCCGTGGATAAGAAGAAGTCCAGAAAGCAGCGGCAGAAAGAGGAAC |
| | | AGAGCTACAAGCTGATCACAAGCCCCAAGGTGGTGGCCCAGGATATCGAG |
| | | TCTCAAGAGATCGAGCGGGACATCTCCGCCGAGATCGCTGATGTGGAAGT |
| | | GTGGGACTTCGACGAACTCGAGGACGAGTGA |
| | | (SEQTDNO: 138) |
| | TnsC | ATGGTCACAGAGGCCAAGGCCATTGCCGACAAGCTGGGCAAGATCGAGCT |
| | | GGACGAAGAGTGGGTGCAGAAAGAGATCGCCCGGCTGAACCGGAAGTCTA |
| | | CAGTGGCCCTGGAACACATCAAAGAGCTGCACGACTGGCTGGACGGCAAG |
| | | AGAAAGAGCAGACGGTCCTGCAGAATCGTGGGCAAGAGCAGAACCGGCAA |
| | | GACAGTGGCCTGTGAAGCCTACGTGATGCGGAACAAGCTGAACAAGCCTC |
| | | CTCAAGAGCGGCAGACCAAGAATCAGATCCCCATCGAGCCCGTGATCATG |
| | | ATTATGCCTCCACAGAAGTGCGGCGCCAAAGAACTGTTCCGCGAGATCAT |
| | | CGAGTGCCTGAAGTTCAGAGCCGTGAAGGGCACCATCAGCGAGTTCAGAT |
| | | CCAGAGCCATGGACGTGCTGCAGAAATGCCAGGTGGAAATGCTGATCATC |
| | | GACGAGGCCGACCGGCTGAAGCCTGAGACATTTTCCGAAGTGCGGGACAT |
| | | CTACGACAAGCTCGAGATCGCCGTGGTGCTCGTGGGCACCGAAAGACTGG |
| | | ATACCGCCGTGAAGAGAGATGAGCAGGTCGAGAACAGATTCCGGGCCAAC |
| | | AGAAGATTCGGCACCCTGGAAGGCATCAACTTCAAGAAAACCGTCGAGAT |
| | | CTGGGAAGAGAAGATCCTGAAGCTGCCCGTGGCCAGCAACCTGACCAACA |
| | | AGACCACCTGGAAGATTCTGCTGATCGCCACCGAGGGCTTCATCGGCAGA |
| | | CTGGACGAGATTCTGAGAGAGGCCGCTATCGCCAGCCTGTCTCAGGGACA |
| | | CAAGAAGGTGGACCCCAAAATCCTGAAAGAGATTGCCAGAGAGTACAGCT |
| | | GA |
| | | (SEQ ID NO: 139) |
| | TniQ | ATGAACAACACCAAAGAGGCCCAGCTCTGGCTGTTCCCCGTGGAACCTTC |
| | | TAATGGCGAGAGCCTGAGCCACTTCCTGGGCAGATTCAGGCGGAGCAACC |
| | | ACCTGTCTCCAAGCGCTCTGGGAGATCTGGCTGGAATTGGCGGAGTGGTG |
| | | GCCAGATGGGAGAGATTCCACCTGAATCCATTTCCAACCGACGAGCAGTT |
| | | TCAGGCCCTGGCCGAAGTGGTGGATGTGGATAGCAGCACCCTGAGAGAGA |
| | | TGCTGCCTCCTAAAGGCACCGGCATGAAGTGCGACCGGCACAACCTGAAG |
| | | CTGATCTCCAAGTGTCCCAACTGCCGGGCCAAGTTCAAGATGCCTGCTCT |
| | | GTGGGAGTACGGCTGCTGCCACAGATGCAGACTGCCTTTTGCCGCTATCG |
| | | CCCAGTACCAGCAGAGCGTGTAA |
| | | (SEQ ID NO: 140) |
| | LE | CGCTAGTACATTCCAGCGTCCTATCAACAGAAGTAGAATTCCCTGAATGA |
| | | TGCCACTAATTCCACTATTAATAGGAACCTCTTCTTTTTGAATAAATATG |
| | | TACGGTGACTAATTATTTGACATAATGACAAATTGTTGTCATGCAATTCA |
| | | AAGCTTTATATGCTAGGCATCATAGCATTTTTATTATAATATTTGATTGA |
| | | CTTATATAATGACAAACAAAATGTCGTTTGTTTGCAAAATGACTAATTAG |
| | | CTGTCGTTTATTGAAAATTCAGTTTTAAAGAAAAGTGACAAGATCTGTGT |
| | | CACTTTTTTATTTAAATATAGAATTACATTATGTGTTTTTTAAAAAAACT |
| | | AATTTACTAAAATGAATAGTGAAAGCACTTCCGAAACAAATTCAAAATTA |
| | | GCTATATCTGATTTGGAAGACGACCGAGAAATAGTCATTACTTCTCAGCT |
| | | AGAAGGAAAAGCAAAAGAGAGACTGGAGGTCATTCAAAGTTTGCTCGAAC |
| | | (SEQ ID NO: 141) |
| | RE | GTTTCAATGACCATTTTGTGATGGCTTGGGTTGAAAGATAAAGGCTTAGT |
| | | CATTGTTATTGATGAAGCGGAAGTGCCAACGACCACACGCAAATTTTAAT |
| | | TCTCAATAACTATCGTCTAATTCTCGCTAAGAAACTGAAAGTAATTTTAA |
| | | AGTCTTGTTCTTTGGTTACTCCAAGTAATTTATTACTTTTAGGCGATCGC |
| | | CTTGCTTGCCGAGTTTAATTTGTATCAGCAATTGCTGTATACAGTCTAAA |
| | | ACCAAGTAAATTCGATTAATTATTTTTTGTGCGACGCAGTAAGTCGCTTG |
| | | ATTTAAGTGAAAATTTCATGACTGAGGTTATGGATTTCTAGTAGATTTCA |
| | | TCCTACTATTCCCACGTAAAGGAGTCTCGTACTCTGGTCACATTGAAAGT |
| | | AAATAATGAACTCAATGGAATGCAGACCATGAATGTATCCGAAGGTGGAT |
| | | AACCTCTATCCAGCTAGGGCTAGGGAAAAGTTGGAAGGGTTAATGTAAAT |
| | | (SEQ ID NO: 142) |
| AP018288/ | TnsB | ATGGACGAGATGCCCATCTTCAACCAGAACGACGAGAGCCTGCTGTTCGA |
| Nostoc sp. | | GAACAACGCCGACATCGACGAGATCCAGGACGACGAGTCCGAGGAAGCCA |
| NIES-4103/ | | ACCTGATCTTCACAGAGCTGAGCGCCGAGGCCAAGATCAAGATGGAAGTG |
| T56 | | ATCCAGGGCCTGTTCGAGCCCTGCGACAGAAAGACATACGGCCAGAAGCT |
| | | GAGAACAGCCGCCGAGAAGCTGGGAAAGACAGTGCGGACAGTGCAGCGGC |
| | | TGGTCAAGAAGTATCAGCAGGACGGCCTGAGCGCCATCGTGGACACCCAG |
| | | AGAAATGACAAGGGCAGCTACCGGATCGACCCCGAGTGGCAGAAGTTCAT |
| | | CATCACCACCTTCAAAGAGGGCAACAAGGGCTCCAAGAAGATGACCCCTG |
| | | CTCAGGTGGCCATGAGAGTGCAAGTTCGGGCTGAACAGCTGGGCCTGAAG |
| | | AAATACCCCAGCCACATGACCGTGTACCGGGTGCTGAACCCCATCATCGA |
| | | GCGGCAAGAGCAGAAGCAGAAACAGCGGAACATCGGCTGGCGGGGCTCTA |
| | | GAGTGTCTCACAAGACCAGAGATGGCCAGACACTGGACGTGCGGTACAGC |
| | | AATCACGTGTGGCAGTGCGACCACACCAAGCTGGATGTGATGCTGGTGGA |
| | | CCAGTACGGCGAGCCTCTTGCTAGACCTTGGCTGACCAAGATCACCGACA |
| | | GCTACAGCCGGTGCATCATGGGAGTGCACGTGGGCTTTGATGCCCCTAGC |
| | | TCTCAGGTTGTGGCCCTGGCTCTGAGATACGCCATCCTGCCTAAGCAGTA |
| | | CAGCGCCGAGTACAAGCTGCTGAGCGAGTGGCGGACATCTGGCATCCCCG |
| | | AGAACCTGTTTACCGACGGCGGCAGAGACTTCAGAAGCGAGCACCTGAAG |
| | | CAGATCGGCTTCCAGCTGGGCTTCGAGTGTCACCTGAGAGACAGACCTAG |
| | | CGAAGGCGGCATCGAGGAAAGAAGCTTCGGAACAATCAATACCGAGTTCC |
| | | TGAGCGGCTTCTACGGCTACCTGGGCAGCAACATCCAAGAGAGATCCAAG |
| | | ACCGCCGAGGAAGAGGCCTGTCTGACACTGAGAGAGCTGCATCTGCTGCT |
| | | CGTGCGCTACATCGTGGATAACTACAACCAGAGGCTGGACGCCCGGACCA |
| | | AGGACCAGACCAGATTTCAGAGATGGGAGGCCGGACTGCCCGCTCTGCCT |
| | | AAGATGGTTCGAGAGCGCGAGCTGGACATCTGCCTGATGAAGAAAACCCG |
| | | GCGGAGCATCTACAAAGGCGGCTATCTGAGCTTCGAGAATATCATGTACC |
| | | GGGGCGACTACCTGGCCGCCTATGCCGGCGAAAACATCGTGCTGAGATAT |
| | | GACCCCAGAGATATCACCACCGTGTGGGTGTACAGAATCGAGAAGGGCAA |
| | | AGAGGTGTTCCTGTCCGCCGCTCATGCCCTGGATTGGGAGACAGAACAGC |
| | | TGTCCCTGGAAGAAGCCAAGGCCGCCTCTAGAAAAGTGCGGAGCGTGGGC |
| | | AAGACCCTGACCAACAAGTCTATCCTGGCCGAGATCCACGACAGAGACAC |
| | | CTTTATCAAGCAGAAGAAGAAGTCCCAGAAAGAGCGCAAGAAAGAGGAAC |
| | | AGGCTCAGGTCCACAGCGTGTACGAGCCCATCAACCTGAGCAAGACCGAG |
| | | CCTCTGGAAAACCTGCAAGAGACACCCAAGCCTGAGACACGGAAGCCCCG |
| | | GGTGTTCAACTACGAGCAGCTGAGACAGGACTACGACGAGTGA |
| | | (SEQ ID NO: 143) |
| | TnsC | ATGAAGGACGACTACTGGCAGAAGTGGATCCAGAACCTGTGGGGCGACGA |
| | | GCCCATTCCTGAAGAACTGCAGCTGGAAATCGAGCGGCTGCTGACACCTA |
| | | GCGTGGTGGAACTGGAACACATCCAGAAGATCCACGACTGGCTGGACGGC |
| | | CTGAGACTGTCTAAGCAGTGCGGCAGAATTGTGGCCCCTCCTAGAGCCGG |
| | | CAAGAGCGTGACATGTGACGTGTACAGACTGCTGAACAAGCCCCAGAAGA |
| | | GAGGCGGCAAGCGGGATATTGTGCCCGTGCTGTATATGCAGGTCCCCGGC |
| | | GATTGCTCTAGCGGAGAACTGCTGGTGCTGATCCTGGAAAGCCTGAAGTA |
| | | CGATGCCACCAGCGGCAAGCTGACCGACCTGAGAAGAAGAGTGCAGAGGC |
| | | TGCTGAAAGAAAGCAAGGTGGAAATGCTGATTATCGACGAGGCCAACTTC |
| | | CTCAAGCTGAACACCTTCAGCGAGATCGCCCGGATCTACGACCTGCTGAG |
| | | AATCAGCATCGTGCTCGTGGGCACCGACGGCCTGGACAACCTGATCAAGA |
| | | AAGAGCCCTACATCCACGACCGGTTCATCGAGTGCTACAGGCTGCCTCTG |
| | | GTGTCCGAGAAGAAATTCCCCGAGCTGGTCAAGATCTGGGAAGAAGAGGT |
| | | GCTCTGCCTGCCTCTGCCTAGCAATCTGATCCGGAACGAGACACTGCTGC |
| | | CCCTGTACCAGAAAACCGGCGGCAAGATCGGCCTGGTGGATAGAGTTCTG |
| | | CGGAGAGCCTCTATTCTGGCCCTGAGAAAGGGCCTGAAGAATATCGACAA |
| | | GGACACCCTGGCCGAGGTGCTGGATTGGTTCGAATGA |
| | | (SEQ ID NO: 144) |
| | TniQ | ATGGAAATCGGAGCCGAGGAACCCCGGTTCTTCGAGGTGGAACCTCTGAA |
| | | TGGCGAGAGCCTGAGCCACTTCCTGGGCAGATTCAGAAGAGAGAACTACC |
| | | TGACCAGCAGCCAGCTGGGCAAGCTGACAGGACTGGGAGCCGTGATCAGC |
| | | AGATGGGAGAAGCTGTACTTCAACCCATTTCCAACCAGGCAAGAGCTGGA |
| | | AGCCCTGGCCACAGTCGTCAGAGTGAACGCCGATAGACTGACCGAGATGC |
| | | TGCCTCTGAAGGGCGTGACCATGAAGCCCAGACCTATCAGACTGTGCGCC |
| | | GCCTGCTATGCCGAGTATCCCTGTCACAGAATCGAGTGGCAGTTCAAGGA |
| | | CAAGATGAAGTGCGACCGGCACAACCTGCGGCTGCTGACCAAGTGCATCA |
| | | ACTGCGAGACACCCTTTCCTATACCTGCCGACTGGGTGGAAGGCGAGTGC |
| | | AGCCACTGCTTTCTGCCTTTTGCCACCATGGCCAAGCGGCAGAAAAGCCG |
| | | GTAA |
| | | (SEQ ID NO: 145) |
| | LE | TAGCTGAAAGTTAGGGAAATACGTAAATTATGTCGTTTAGCACTGTCAAA |
| | | TTGGACAATAATTCTTTAAAACTGACAATAATGATTTAATGGACATGTCG |
| | | ATTAACTAATTATTTGTCGTCTTAACAAAATAATGTCGTCAAAGATAAAA |
| | | TGTTTGAAAACGTTGCTAAATAAGTGTTTGCAGCGTTTTTTAGTATGTCA |
| | | ACAATCAAGACCGAATTTAACATTTTAATTGTCGTATATTAAAATATTCA |
| | | CAAATTTTATGTCGTTTTTTCAGATTTGAGTTTTCCAAATTTTTTGGAAT |
| | | GTATAACAAATTAGTTGTCGCTTTTTAGCAAAAATAGTGCTATTATAATA |
| | | TTATTTAGTATATATGTACTAAATAATACATTCTCATACCAAAAAGTTAC |
| | | TACTTCCATTGACGGGTCAACCGCTTTAGGAAGATTGGATGTTAGCGCAC |
| | | AATAGCGAGTTTGATATTACTGTTTTGAGCATGAATCAAGTTTTCCTATG |
| | | (SEQ ID NO: 146) |
| | RE | GTTTCAACAACCATTTAAGCTAAGCAGGTGTTGCAAAAATAAGTATATAG |
| | | AGACTATTTACTTGCACTAACTAGGCTTTAGAATTGTTGAAGGGTATAAC |
| | | TGAGTTATTAGGAGGGTTGAAAGGAGCGCTGCGATCGAACAAAAATCAAA |
| | | GTCAGTGGTTAAGCATAATCAACAATTCAATGACATTAATGTGTTAACAG |
| | | TTGACTAAGTTAAATCGATGACATTAATTTGTTAAAAGCGACGCTAATTT |
| | | GTTAATAACGACAATAATCTGTTAACAACGACAAATAATTAGTTAATCGA |
| | | CAGGACATATGGAGAATAGGGAACTCGAATCCCTGACCTCTGCGGTGCGA |
| | | TCGCAGCGCTCTACCAGCTGAGCTAATTCCCCTTAAAAGTGCTGAGTCTT |
| | | GCTAACTCAACGCACTACTACAATATAATATTTTAACATTCTCCTGCTGT |
| | | AGGCTGAGACTCTTTTTGTAAAAAGACTTCTTGTACTCGTTCAAGTTCTA |
| | | (SEQ ID NO: 147) |
| AP018318/ | TnsB | ATGCCCGACAAAGAGTTTGGACTGACCGGCGAGCTGACCCAAGTGACCGA |
| Nostoc sp. | | GGCCATCTTTCTGGGCGAGAGCAACTTCGTGGTGGACCCTCTGCACATCA |
| HK-01/ | | TCCTGGAAAGCAGCGACAGCCAGAAGCTGAAGTTCCACCTGATCCAGTGG |
| T57 | | CTGGCCGAGTCTCCCAACAGACAGATCAAGAGCCAGCGGAAGCAGGCCGT |
| | | GGCTGATACACTGGGAGTGTCCACCAGACAGGTGGAAAGACTGCTGAAAG |
| | | AGTACAACGAGGACCGGCTGAACGAGACAGCTGGCGTGCAGAGATCTGAC |
| | | AAGGGCCAGTACAGAGTGTCCGAGTACTGGCAAGAGTACATCAAGACCAC |
| | | CTACGAGAACAGCCTGAAAGAAAAGCACCCTATGAGCCCCGCCAGCGTCG |
| | | TGCGGGAAGTGAAAAGACACGCCATCGTGGATCTGGGCCTCGAGCAGGGC |
| | | GATTATCCTCATCCTGCCACCGTGTACCGGATCCTGAATCCTCTGATCGA |
| | | GCAGCAGAAACTGAAGAAGAAGATCAGAAACCCCGGCAGCGGCAGCTGGC |
| | | TGACCGTGGAAACAAGAGATGGCAAGCAGCTGAAGGCCGAGTTCAGCAAC |
| | | CAGATCATCCAGTGCGACCACACCGAGCTGGACATCCGGATCGTGGACAA |
| | | CAATGGCGTGCTGCTGCCCGAAAGACCTTGGCTGACAACCGTGGTGGATA |
| | | CCTTCAGCAGCTACGTGCTGGGCTTTCACCTGTGGATCAAGCAGCCTGGA |
| | | AGCGCCGAAGTTGCCCTGGCTCTGAGACACAGCATCCTGCCTAAGCAGTA |
| | | CAGCCACGACTACGAGCTGAGCAAGCCTTGGGGCTACGGCCCTCCATTCC |
| | | AGTACTTTTTCACCGACGGCGGCAAGGACTTCAGATCCAAGCACCTGAAA |
| | | GCCATCGGCAAGAAACTGGGATTTCAGTGCGAGCTGCGGGACAGACCTAA |
| | | TCAAGGCGGCATCGTGGAACGGATCTTCAAGACCATCAACACACAGGCCC |
| | | TGAAGGACCTGCCTGGCTACACAGGCAGCAACGTGCAAGAGAGGCCTGAG |
| | | AACGCCGAGAAAGAAGCCTGCCTGACCATCCAGGACATCGACAAAGTGCT |
| | | GGCCGGCTTCTTCTGCGACATCTACAACCACGAGCCTTATCCTAAGGACC |
| | | CCAGAGACACCAGATTCGAGCGGTGGTTCAAAGGCATGGGCGGCAAGCTG |
| | | CCTGAGCCTCTGGATGAGAGAGAGCTGGATATCTGCCTGATGAAAGAAAC |
| | | CCAGAGAGTGGTGCAGGCCCACGGCAGCATCCAGTTTGAGAACCTGGTGT |
| | | ACAGAGGCGAGAGCCTGAGAGCCTACAAGGGCGAGTATGTGACCCTGAGA |
| | | TACGACCCCGACCACATCCTGACACTGTACGTGTACAGCTGCGACGCCAA |
| | | CGACGACCTGGGCGATTTTCTGGGATATGTGCACGCCGTGAACATGGACA |
| | | CCCAAGAGCTGTCCCTGGAAGAACTGAAGTCCCTGAACAAAGAGCGGAAC |
| | | AAGGCCCTGAGAGAGCACTGCAATTACGACGCCCTGCTGGCCCTGGGCAA |
| | | GAGAAAAGAGCTGGTCAAAGAGCGCAAGCAAGAGAAGAAAGAGATCCGGC |
| | | AGGCCGAACAGCAGAGGCTGAGAAGCGGCAGCAAGAAAAACTCCAACGTG |
| | | GTGGAACTGAGAAAGAGCCGGGCCAAGAACTACCTGCGGAACAACGAGCC |
| | | TATCGAGGTGCTGCCAGAGCGGGTGTCCAGAGAAGAGATCCAGGTGCAGA |
| | | AAACCGAGGTGCAGATCGAGGTGTCCGAACAGGCCGACAACCTGAAGCAA |
| | | GAACGGCACCAGCTCGTGATCAGCAGACGGAAGCAGAACCTGAAAAACAT |
| | | CTGGTGA |
| | | (SEQ ID NO: 148) |
| | TnsC | ATGGCTCAGTCCCAGCTGGCCATCCAGCCTAACGTGGAAGTTCTGGCCCC |
| | | TCAGCTGGACCTGAACAACCAGCTGGCTAAAGTGATCGAGATCGAGGAAA |
| | | TCTTCAGCAACTGCTTCATCCCCACCGACCGGGCCAGCGAGTACTTCAGA |
| | | TGGCTGGACGAGCTGCGGATCCTGAAGCAGTGTGGCAGAGTTGTGGGCCC |
| | | CAGAGATGTGGGCAAGAGCAGAACAAGCGTGCACTACAGAGAAGAGGACC |
| | | GGAAGAAAGTGTCCTACGTCAGAGCTTGGAGCGCCAGCAGCAGCAAGAGA |
| | | CTGTTCAGCCAGATTCTGAAGGACATCAACCACGCCGCTCCTACCGGCAA |
| | | GAGAGAGGATCTCAGACCTAGACTGGCCGGCAGCCTGGAACTGTTCGGAA |
| | | TCGAGCAAGTGATCGTGGACAACGCCGACAACCTGCAGAGAGAGGCTCTG |
| | | CTGGATCTCAAGCAGCTGTTCGACGAGAGCAACGTGTCCGTGGTGCTCGT |
| | | TGGAGGCCAAGAGCTGGACAAGATCCTGTACGACTTCGACCTGCTGACCA |
| | | GCTTTCCCACACTGTACGAGTTTGACCGGCTGGAACAGGACGACTTCCTG |
| | | AAAACCCTGAGCACCATCGAGTTCGACGTGCTGGCTCTGCCTGAGGCCAG |
| | | CAATCTGTGCAAGGGCATCACCTTCGAGATCCTGGCCGAGACAACAGGCG |
| | | GCAGAATGGGCCTGCTGGTTAAGATCCTGACCAAGGCCGTGCTGCACAGC |
| | | CTGAAGAATGGCTTCGGCAGAGTGGACCAGGGCATCCTGGAAAAGATCGC |
| | | CAACAGATACGGCAAGCGGTACATCCCTCCTGAGAACCGGAACAAGAACA |
| | | GCTGA |
| | | (SEQ ID NO: 149) |
| | TiQ | ATGGCCAGAGACACCTTTCCACCTAAGATCGAGATCCGCATCCACGACAA |
| | | CCACGAGGCCCTGCTGAGACTGGGCTACGTGGACCCTTATGAGGGCGAGA |
| | | GCATCAGCCACTACCTGGGCAGACTGCGGAGATTCAAGGCCAACAGCCTG |
| | | CCTAGCGGCTACAGCCTGGGAAAGATCGCCGGAATTGGCGCCGTGACCAC |
| | | CAGATGGGAGAAGCTGTACTTCAACCCATTTCCGAGCAACAAAGAGCTGG |
| | | AAGCCCTGGGCAAGCTGATCTGCCTGCCTACCAACCGGATCTACGAGATG |
| | | CTGCCTCCTAAGGGCGTGACCATGAAGCCCAGACCTATCAGACTGTGCGC |
| | | CGCCTGTTATGCCGAGGTGCCCTGTCACAGAATCGAGTGGCAGTACAAGG |
| | | ACAAGATGAAGTGCGACCGGCACAACCTGCGGCTGCTGACCAAGTGCACC |
| | | AACTGCGAGACAACATTCCCCATTCCAGCCGACTGGGTGCAGGGCGAATG |
| | | CCCTCACTGCTTTCTGCCCTTTCCAATGATGGTCAAGCGGCAGCGGCAGC |
| | | TGAGCAACTAA |
| | | (SEQ ID NO: 150) |
| | LE | TTTCAAATTCACTTAATTAAACCTGTTGAACAACCACAATTGCTAAATGC |
| | | GATCAGGCAAATTTTGGCTAACTTAGATTAATTCTTAATTAACGTGTACA |
| | | TTCGCACATTATATGTCGCAATTCGCAAAAAACGACATGAGCGTCTTTAT |
| | | CATCTAAAACGCTTATCATATAAAGCTTTCAGGACATTGTTGACTAAAAA |
| | | TACAAAATTCCTTAATTCGCACATTAAATGTCGTTAGAACTGAAATTTGC |
| | | AAATTAATGTCGTTTATTTAAATTTTGCCACATTGCAAATTCAATGTCGC |
| | | ATTTTCTTTAGTTAATGGTACATTAATACTACCAATAACTACATTCTCCT |
| | | TGCTTAAATGCCAGACAAAGAATTTGGATTAACCGGAGAATTGACACAAG |
| | | TTACGGAAGCTATTTTCCTTGGTGAAAGTAATTTTGTGGTCGATCCATTA |
| | | CACATTATTCTGGAATCCTCAGATAGCCAGAAACTCAAATTTCATCTCAT |
| | | (SEQ ID NO: 151) |
| | RE | AGTTTCAACAACCGGCTAGGGGTGGGTTGAAAGCACCGTAAGCACTCCAC |
| | | TTACATCTGAGTTGCTTATCAGGGTTTCAACAACCATCCCGGTTAGGGGT |
| | | GGGTTGAAAGGACAATAATTATTTAATAAGCCACAAGCTTTCGCAGGGTT |
| | | CAACAAATATTGAGGTTATGGCAGTTTTGCAAAAACAAGCATATAGAGAT |
| | | TATTTATTCGCATTAACCAGGTTTTAAAATAGTTAAAGGGTATACATGAA |
| | | TTATTAGGAGGGTTGAAAGGAGCGCTGCGATCGGACAAAATTCAATGAGG |
| | | AAATAATTCGCTTGCGGTAAACTTGACAGCTAATGACTAAACAATACGAC |
| | | GTTAATTTGCGAAACGTTAATATAACCGAATTAGTGGCACGAATTAGGGA |
| | | AAGCGACATTAATGTGCAAACAACGACACCAATTTGCGAAGAACGACATA |
| | | TAATGTGCGAATGTACAGTACAAATGGAGAATAGGGAACTCGAATCCCTG |
| | | ACCTCTGCGGTGCGATCGCAGCGCTCTACCAACTGAGCTAATTCCCCTTA |
| | | AAATGGTTGTTGCTGAGTTAATCAAATTACTAGCAATTCAATCAACGCTC |
| | | (SEQ ID NO: 152) |
| CP000117/ | TnsB | ATGCTGGACGACCCCGACAAGGGCAATCAAGAGCCTGAGACACACGAGAT |
| Trichormus | | CGTGACCGAGCTGAGCCTGGACGAACAGCATCTGCTGGAAATGATCCAGA |
| variabilis | | AGCTGATCGAGCCCTGCGACCGGATCACATACGGCGAGAGACAGAGAGAG |
| ATCC | | GTGGCCGGCAAGCTGGGAAAGTCTGTGCGGACAGTTCGGCGGCTGGTCAA |
| 29413/T58 | | GAAGTGGGAGCAAGAAGGACTGACAGCCCTGCAGACAGCCACCAGAACCG |
| | | ATAAGGGCACCCACAGAATCGACAGCGACTGGCAGGACTTCATCATCAAG |
| | | ACCTACAAAGAGAACAACAAGGACGGCAAGCGGATGAGCCCCAAACAGGT |
| | | GGCACTGAGAGTGCAGACCAAGGCCGAAGAACTGGGCCAGCAGAAGTACC |
| | | CCAGCTACCGGACAGTGTACAGAGTGCTGCAGCCCATCATCGAGCAGAAA |
| | | GAGCAAAAAGAGGGCATCAGACACAGAGGCTGGCACGGCTCTAGACTGAG |
| | | CGTGAAAACCAGAGATGGCAAGGACCTGTTCGTGGAACACAGCAACCACG |
| | | TGTGGCAGTGCGACCACACCAGAGTGGATCTGCTGCTGGTGGATCAGCAC |
| | | GGCGAGCTGCTTTCTAGACCCTGGCTGACCATCGTGGTGGACACCTACTC |
| | | CAGATGCATCATGGGCATCAACCTGGGCTTCGACGCCCCTAGCTCTCAAG |
| | | TGATTGCTCTGGCCCTGCGGCACGCCATCCTGCCTAAGAGATACGGCTCT |
| | | GAGTACGGCCTGCACGAGGAATGGGGCACCTATGGAAAGCCCGAGCACTT |
| | | CTACACCGACGGCGGCAAGGACTTCAGAAGCAACCATCTGCAGCAGATTG |
| | | GCGTGCAGCTGGGCTTTGTGTGTCACCTGAGAGACAGGCCTAGCGAAGGC |
| | | GGCATCGTGGAAAGACCTTTCGGCACCTTCAACACCGACCTGTTCAGCAC |
| | | CCTGCCTGGCTACACAGGCAGCAACGTGCAAGAGAGGCCTGAGCAGGCCG |
| | | AGAAAGAGGCCTGTATCACCCTGAGAGAGCTGGAAAGACTGCTCGTGCGG |
| | | TACATCGTGGACAAGTACAACCAGAGCATCGACGCCAGACTGGGCGATCA |
| | | GACCCGGTATCAGAGATGGGAGGCCGGACTGATCGTGGCCCCTAACCTGA |
| | | TCAGCGAGGAAGAACTGCGGATCTGCCTGATGAAGCAGACCCGGCGGAGC |
| | | ATCTACAGAGGCGGCTATGTGCAGTTCGAGAACCTGACCTACCGGGGCGA |
| | | AAATCTGGCCGGATATGCCGGCGAGAACGTGGTGCTGAGATACGACCCCA |
| | | AGGACATCACCACACTGCTGGTGTACCGGCAGAAGGGAAATCAAGAAGAG |
| | | TTCCTGGCCAGAGCCTACGCTCAGGACCTGGAAACAGAGGAACTGTCTGT |
| | | GGACGAGGCCAAGGCCATGAGCAGAAGAATCAGACAGGCCGGAAAGGCCA |
| | | TCAGCAACCGGTCTATTCTGGCCGAAGTGCGGGACCGCGAGACATTCGTG |
| | | AACCAGAAAAAGACCAAGAAAGAGCGCCAGAAGGCCGAGCAGACAATCGT |
| | | GCAGAAAGCCAAGAAACCCGTGCCTGTGGAACCCGAGGAAGAGATCGAAG |
| | | TCGCCTCCGTGGATAGCGAGCCCGAGTATCAGATGCCCGAGGTGTTCGAC |
| | | TACGAGCAGATGCGCGAGGACTACGGCTGGTAA |
| | | (SEQ ID NO: 153) |
| | TnsC | ATGACAAGCAAGCAGGCCCAGGCTGTTGCTCAGCAGCTGGGAGACATCCC |
| | | CGTGAACGACGAGAAGATCCAGGCCGAGATCCAGCGGCTGAACAGAAAGA |
| | | GCTTCATCCCTCTGGAACAGGTGCAGATGCTGCACGACTGGCTGGACGGC |
| | | AAGAGACAGAGCAGACAGTCTGGCAGAGTCGTGGGCGAGAGCAGAACCGG |
| | | CAAGACCATGGGCTGTGACGCCTACAGACTGCGGCACAAGCCTAAGCAAG |
| | | AGCCCGGCAGACCTCCTACAGTGCCCGTGGCCTATATCCAGATTCCTCAA |
| | | GAGTGCGGCGCCAAAGAACTGTTCGGCGTGCTGCTGGAACACCTGAAGTA |
| | | CCAGATGACCAAGGGCACCGTGGCCGAGATTAGAGACAGAACCCTGCGGG |
| | | TGCTGAAAGGCTGCGGAGTGGAAATGCTGATCATCGACGAGGCCGACCGG |
| | | CTGAAGCCTAAGACATTTGCCGAGGTGCCCGACATCTTCGACAAGCTGGA |
| | | AATCGCCGTGATCCTCGTGGGCACCGATAGACTGGATGCCGTGATCAAGC |
| | | GGGACGAACAGGTGTACAACCGGTTCAGAGCCTGCCACAGATTCGGCAAG |
| | | TTTAGCGGCGACGAGTTCAAGAAAATCGTGGACATCTGGGAGAAGAAGGT |
| | | GCTGCAGCTGCCTGTGGCCAGCAACCTGAGCAGCAAGACAATGCTGAAAA |
| | | CCCTGGGCGAGACAACCGGCGGCTATATCGGACTGCTGGACATGATCCTG |
| | | AGAGAGAGCGCCATCAGAGCCCTGAAGAAAGGCCTGAGAAAGGTGGACCT |
| | | GGCCACACTGAAAGAAGTGACCGAAGAGTACAAGTGA |
| | | (SEQ ID NO: 154) |
| | TniQ | ATGGAAGTGCCCCAGATCCAGCCTTGGCTGTTCCAGATCGAACCCCTGGA |
| | | AGGCGAGAGCCTGTCTCACTTCCTGGGCAGATTCAGACGGGCCAACGATC |
| | | TGACACCAACCGGCCTGGGAAAAGCCGCTGGACTTGGCGGAGCTATTGCC |
| | | AGATGGGAGAAGTTCCGGTTCAACCCTCCACCTAGCCGGCAGCAACTGGA |
| | | AGCCCTGGCCAATGTCGTGGGAGTCGATGCCGATAGACTGGCCCAGATGC |
| | | TTCCTTCTGCTGGCGTGGGCATGAAGATGGAACCCATCAGACTGTGCGCC |
| | | GCCTGCTATGCCGAATCTCCCTGTCACAAGATCGAGTGGCAGTTCAAAGT |
| | | GACCCGGGGCTGCGCCAGACACAAGATCACACTGCTGAGCGAGTGCCCCA |
| | | ACTGCAAGGCCAGATTCAAGGTGCCAGCTCTGTGGGTGGACGGCTGGTGC |
| | | AACAGATGCTTTCTGAGATTCGAGGAAATGGCCAAGTACCAGAAAGGCCT |
| | | GTGA |
| | | (SEQ ID NO: 155) |
| | LE | TATGGTAATAGTGCAAATGAAGATAGGAAGCACCTCGCCAACTTAGATCC |
| | | GGAAAACGGGGTGAAGCGATCGCCTGTTGGTTGACAACTGCACTTGTAGA |
| | | GCGACAAATAATTTGTCGTTCTACAATTGTCGATTGCCAAATTATATGAC |
| | | CACTTGACAAGTTAATGTCATTCAAAATATTATCCTCAAAACCCTTGCCA |
| | | AGCAAGGGTTTTGTTATTTTAGGCTCAAAATACCCAGAAACTTATTGCCA |
| | | AAATAGCTGTCCTCTTTTGAAAAGTTGACGAAATATCTGTCCTTGCTTGA |
| | | AAAGGGACTTGAGGGAAGATTTTTACAGAAATTGACAAAATAAATGTCCT |
| | | CCAAGTAGTACAATACAACTACGTTTTTATTGAACATTTATGTAAATATG |
| | | CTGGATGATCCTGATAAGGGCAATCAAGAGCCAGAAACGCATGAGATAGT |
| | | GACTGAGCTATCACTAGATGAGCAGCATTTGCTGGAAATGATTCAGAAAC |
| | | (SEQ ID NO: 156) |
| | RE | CCGAAGTGGGGGGGGTTGAAAGACCTTCATGCAAGGATATAAAAAATTTT |
| | | AGGTGGGTTGAAAGGCGCACTTCGTTCGGGATTTTCCCTGACCGAAACAG |
| | | TACCAATAAATCAAAGCTATTATAATAACAGCTTCTAATGCCAATACACC |
| | | TTGATGACTAAGTAATTTGGCAACGCGGACAACAACTTGGCAATACGGAC |
| | | AACAATTTGTCAACGCAGACAAAGAATTTGGCAATCGACAACAATAATCG |
| | | GGATGACTGGATTCGAACCAGCGGCCCCTTCGTCCCGAACGAAGTGCGCT |
| | | ACCAAGCTGCGCTACATCCCGTTAAAAAATTTATACGCCTTTTTTAGCAT |
| | | AACATAAATAATAGTCAATACAGAAAAGACATCTACATCTATATATATAG |
| | | ATGAATCGGAACGGGATTTGCTTGCTAGGATTAGATTTGTATAACATTCA |
| | | GTGGTAAAAGCGGATTGTGACTGTAAAACCAGACTGGTTGCGGGTAAAAG |
| | | (SEQ ID NO: 157) |
| CP003548/ | TnsB | ATGGACGAGATGCCCATCGTGAAGCAGGACGACGAGAGCCTGCCTGTGGA |
| Nostoc sp. | | AAACAACGACGATGTGGATGAGATCCAGGACGATGAGCTGGAAGAGACAA |
| PCC 7107/ | | ACGTGATCTTCACCGAGCTGAGCGCCGAGGCCAAGCTGAAGATGGATGTG |
| T59 | | ATTCAGGGCCTGCTGGAACCCTGCGACAGAAAGACATACGGCGAGAAGCT |
| | | GAGAGTGGCCGCCGAGAAACTGGGAAAGACAGTGCGGACAGTGCAGCGGC |
| | | TGGTCAAGAAGTATCAGCAGGACGGCCTGAGCGCCATCGTGGAAACCCAG |
| | | AGAAACGACAAGGGCAGCTACCGGATCGACCCCGAGTGGCAGAAATTCAT |
| | | CGTGAACACCTTCAAAGAGGGCAACAAGGGCTCCAAGAAGATGACCCCTG |
| | | CTCAGGTGGCCATGAGAGTGCAAGTTCGGGCTGAACAGCTGGGCCTGCAG |
| | | AAATTTCCCAGCCACATGACCGTGTACCGGGTGCTGAACCCCATCATCGA |
| | | GCGGCAAGAGCGGAAGCAGAAGCAGAGAAACATCGGCTGGCGGGGCAGCA |
| | | GAGTGTCCCACAAGACAAGAGATGGCCAGACACTGGACGTGCGGTACAGC |
| | | AATCACGTGTGGCAGTGCGACCACACCAAGCTGGATGTCATGCTGGTGGA |
| | | CCAGTACGGCGAGCCTCTTGCCAGACCATGGTTCACCAAGATCACCGACA |
| | | GCTACAGCCGGTGCATCATGGGCATCCACGTGGGCTTTGATGCCCCTAGC |
| | | TCTCAGGTTGTGGCCCTGGCCTCTAGACACGCCATTCTGCCTAAGCAGTA |
| | | CAGCGCCGAGTACAAACTGATCAGCGACTGGGGCACCTACGGCGTGCCCG |
| | | AGAATCTGTTTACAGACGGCGGCAGAGACTTCAGAAGCGAGCACCTGAAG |
| | | CAGATCGGCTTCCAGCTGGGCTTCGAGTGTCACCTGAGAGACAGACCTAG |
| | | CGAAGGCGGCATCGAGGAAAGAAGCTTCGGAACAATCAATACCGAGTTCC |
| | | TGAGCGGCTTCTACGGCTACCTGGGCAGCAACATCCAAGAGAGAAGCAAG |
| | | ACCGCCGAGGAAGAGGCCTGTCTGACACTGAGAGAGCTGCATCTGCTGCT |
| | | CGTGCGCTACATCGTGGACAACTACAACCAGAGGCTGGACGCCCGGACCA |
| | | AGGACCAGACCAGATTTCAGAGATGGGAGGCCGGACTGCCTGCTCTGCCC |
| | | AAGATGGTCAAAGAGCGCGAGCTGGACATCTGCCTGATGAAGAAAACCCG |
| | | GCGGAGCATCTACAAAGGCGGCTATCTGAGCTTCGAGAACATCATGTACC |
| | | GGGGCGATTACCTGGCCGCCTATGCCGGCGAGAATATCGTGCTGAGATAC |
| | | GACCCCAGAGACATCACCACCGTGTGGGTGTACAGAATCGATAAGGGCAA |
| | | AGAGGTGTTCCTGTCCGCCGCTCATGCCCTGGATTGGGAGACAGAACAGC |
| | | TGTCCCTGGAAGAAGCCAAGGCCGCCTCTAGAAAAGTGCGGAGCGTGGGC |
| | | AAGACCCTGAGCAACAAGTCTATCCTGGCCGAGATCCACGACCGGGACAC |
| | | CTTT |
| | | ATCAAGCAGAAGAAGAAGTCCCAGAAAGAGCGCAAGAAAGAGGAACAGGC |
| | | CCAGGTCCACGCCGTGTACGAGCCTATCAATCTGAGCGAGACAGAGCCCC |
| | | TGGAAAACCTGCAAGAGACACCCAAGCCTGTGACCAGAAAGCCCCGGATC |
| | | TTCAACTACGAGCAGCTGCGGCAGGACTACGACGAGTAA |
| | | (SEQ ID NO: 158) |
| | TnsC | ATGAAGGACGACTACTGGCAGAGATGGGTGCAGAACCTGTGGGGCGACGA |
| | | GCCCATTCCTGAAGAACTGCAGCCCGAGATCGAGAGACTGCTGAGCCCTT |
| | | CTGTGGTGGAACTGGAACACATCCAGAAGATCCACGACTGGCTGGACGGC |
| | | CTGAGACTGTCTAAGCAGTGCGGCAGAATTGTGGCCCCTCCTAGAGCCGG |
| | | CAAGAGCGTGACATGTGACGTGTACCGGCTGCTGAACAAGCCCCAGAAGA |
| | | GAGGCGGCAAGCGGGATATTGTGCCCGTGCTGTATATGCAGGTCCCCGGC |
| | | GATTGCTCTAGCGGAGAACTGCTGGTGCTGATCCTGGAAAGCCTGAAGTA |
| | | CGATGCCACCAGCGGCAAGCTGACCGACCTGAGAAGAAGAGTGCAGCGCC |
| | | TGCTGAAAGAAAGCAAGGTGGAAATGCTGATTATCGACGAGGCCAACTTC |
| | | CTCAAGCTGAACACCTTCAGCGAGATCGCCCGGATCTACGACCTGCTGAG |
| | | AATCAGCATCGTGCTCGTGGGCACCGACGGCCTGGACAACCTGATTAAGA |
| | | GAGAGCCCTACATCCACGACCGGTTCATCGAGTGCTACAAGCTGCCCCTG |
| | | GTGGAAAGCGAGAAGAAATTCACCGAGCTGGTCAAGATCTGGGAAGAAGA |
| | | GGTGCTCTGCCTGCCTCTGCCTAGCAACCTGACCAGAAGCGAGACACTGG |
| | | AACCCCTGCGGAGAAAGACCGGCGGAAAGATCGGACTGGTGGACAGAGTG |
| | | CTGCGGAGAGCCTCTATTCTGGCCCTGAGAAAGGGCCTGAAGAATATCGA |
| | | CAAAGAAACCCTGACCGAGGTGCTGGATTGGTTCGAGTGA |
| | | (SEQ ID NO: 159) |
| | TniQ | ATGGAAATCGGAGCCGAGGAACCCCACATCTTCGAGGTGGAACCTCTGGA |
| | | AGGCGAGAGCCTGTCTCACTTCCTGGGCAGATTCAGAAGAGAGAACTACC |
| | | TGACCAGCAGCCAGCTGGGCAAGCTGACAGGACTGGGAGCTGTGGTGTCC |
| | | CGGTGGAAGAAGCTGTACTTCAACCCATTTCCAACGCGGCAAGAGCTGGA |
| | | AGCCCTGACCTCTGTCGTCAGAGTGAACGCCGATAGACTGGCCGAGATGC |
| | | TGCCTCCTAAGGGCGTGACCATGAAGCCCAGACCTATCAGACTGTGCGCC |
| | | GCCTGTTATGCCGAGGTGCCCTGTCACAGAATCGAGTGGCAGTTCAAGGA |
| | | CGTGATGAAGTGCGACCGGCACAACCTGAGACTGCTGACCAAGTGCACCA |
| | | ACTGCGAGACAAGCTTCCCCATTCCTGCCGAATGGGTGCAGGGCGAGTGC |
| | | CCTCACTGCTTTCTGCCTTTTGCCACCATGGCCAAGCGGCAGAAACACGG |
| | | CTAA |
| | | (SEQ ID NO: 160) |
| | LE | AGCAAATATTGCTATCATATTTTTTTAGTTTAGTTATACTTCCATGAGAT |
| | | ATTCAACAAGTATCAACCTCAATTAAATGCAGATAAATTTAAGTTGTTGA |
| | | ATAACTAATTATTTGTCGTCTTAACAAAATAATGTCGTCAAATATAAAAC |
| | | TATCAAAAATGTTGCTACATGAGTGTTTACAACGTTTTTTATTATGTAAT |
| | | GGGTTAGTAGTTTATTTAACACTTTACTTGTCGTTGATTTAAATAATAAC |
| | | AAAATAAACGTCGTCTTTTAAAATTTTACGTTTTCTAAAATTTTCTAGTT |
| | | TCATAACAAATTAGCTGTCGCTTTTTAGCTTGAATAGTGGTATTATAATT |
| | | TTATTTAGTACATTTGCACTAAATAATACATCCTTATACCGAAAAGTTGC |
| | | CGCGTCCATTGAGGGGTCAACTGCTTTAGGAAGTTTGGATGTTCTCGCAC |
| | | AATAGCGAGATTGTGATTACTGTTTTGAGTATGAATCAAGTTTTCCTATG |
| | | (SEQ ID NO: 161) |
| | RE | AGTTTCAACAACTATCCCAGCTAGGGATGAGTTGAAAGAGCGTCAGAAAA |
| | | TATTTAACAGAGGGTTGAAAGGTGCATCCGACTTGTAAGCATATTTATGA |
| | | ATATTATCAGGGAAGTCATCAAATAAAGATTTAGCTATATTTCCTGTACA |
| | | ATAGATGTCTGCAAACACTTTATCAAATTGGTTAGACGACATTAATTTGT |
| | | TAACGTTTCGCAATTAGCATTATACGACACTAATTTGTTAACAGTGACAT |
| | | TAATTTGTTAATAGCGACAGCAATCTGTTAACAACGACAAATAATTAGTT |
| | | ATTCGACATAAGTTAAAGCCAGCAGCTGGATTTGAACCTGCGACCTTCCG |
| | | ATTACAAGTCGGATGCACTACCACTGTGCTATGCTGGCATTATTAAGCTC |
| | | ACCGATTTATGATTATAACATAAGCAAAATATTTGTCTAGAGGAAGCTGC |
| | | GAAAAAAATTTGCTTGGATGTTCGAGACTGGAAGGTTAGTACTTCAACCT |
| | | (SEQ ID NO: 162) |
| PVWN0100 | TnsB | ATGCAGGACGACAGATCCCTGGAAGTGCCCATTCCTGCCGAAGTGAACGA |
| 0012.1/ | | GATCGTGACCGACTTCAGCGACGACGCCAAGCTGATGCAAGAAGTGATCC |
| Chlorogloea | | AGAGCCTGCTGGAACCCTGCGACAGAATCACCTACGGCCAGAGACAGAGA |
| sp. CCALA | | GAGGCCGCTGCCAAGCTGGGAAAGTCTGTGCGGACCATCAGACGGCTGGT |
| 695/T60 | | CAAGAAGTGGGAAGCCGAGGGACTGAATGCCCTGCAGGCCACACAGAGAA |
| | | CCGACAAGGGCAAGCACCGGATCGACCAGAAGTGGCAAGAGTTCATCATC |
| | | AAGACCTACAAAGAGGGCAACAAGGGCAGCAAGCGGATCACCCCTCAGCA |
| | | GGTTGCAGTTAGAGTGGCCGCCAAAGCCGCCGAGCTGGGCCAAGAGAAGT |
| | | ACCCCAGCTACCGGACCGTGTACAGAGTGCTGCAGCCCATCATCGAGAAG |
| | | CAGGACAAGACACAGAGCGTGCGGAGCAGAGGCTGGCGAGGATCTAGACT |
| | | GAGCGTGAAAACCAGAGATGGCCAGGACCTGAGCGTGGAATACTCCAACC |
| | | ACGTGTGGCAGTGCGACCACACCAGAGCTGATGTGCTGCTGGTGGACAGA |
| | | GATGGACAGCTGCTTGGCAGACCTTGGCTGACCACCGTGATCGACACCTA |
| | | CAGCAGATGCATCATCGGCATCAACCTGGGCTACGACGCCCCTAGTTCTC |
| | | AGGTTGTGGCTCTGGCCCTGAGACACGCCATTCTGCCTAAGCAGTACAGC |
| | | AGCGAGTACAAGCTGCACTGCGAGTGGGGCACATACGGCAAGCCTGAGCA |
| | | CTTCTACACCGACGGCGGCAAGGACTTCAGAAGCAACCATCTGCAGCAGA |
| | | TCGGCGTGCAGCTGGGCTTCGTGTGTCACCTGAGAGACAGACCTAGCGAA |
| | | GGCGGCATCGTGGAAAGACCCTTCGGCACCTTCAACACCAACCTGTTCAG |
| | | CACCCTGCCTGGCTACACCGGCAGCAATGTGCAAGAGAGGCCTGAAGAGG |
| | | CCGAGAAAGAGGCCAGCCTGACACTGAGAGAGCTGGAACAACTGCTCGTG |
| | | CGGTACATCGTGGACAAGTACAACCAGAGCATCGACGCCCGGATGGGCGA |
| | | TCAGACCAGATTTCAGAGATGGGAGGCCGGACTGATCGCCGTGCCTTCTC |
| | | CAATCAGCGAGAGAGATCTGGACATCTGCCTGATGAAGCAGACCAGACGG |
| | | ACCATCTACAGAGGCGGCTACCTGCAGTTCGAGAACCTGACCTACAGGGG |
| | | CGACAGACTGGAAGTGTATGCCGGCGAGTCTGTGGTGCTGAGATACGAGG |
| | | AAAAGGACATCACCACCATCCTGGTGTACCGGAAAGAAGGCGGGAAAGAA |
| | | GTCTTTCTGGCCCACGCCTACGCACAGGATCTGCAGACAGAGCAGCTGAG |
| | | CTTTGACGAGGCCAAGGCCAGCAGCCGGAAGCTTAGAGATGCCGGAAAGG |
| | | CCGTGTCCAACAGATCCATCCTGGCTGAAGTGCGGTACTCCGCTTCTGCT |
| | | CTGGCTGAGCTGAGAGAGACATTCCTGGCTCAGAAGAAGTCCAAGAAAGA |
| | | GCGGCAGAAAAGCGAACAGGTGCAGATCCACCGGAAGAAAGAACTGTTCC |
| | | CCATCGAGGCCGAAGCCACCGAGTTTGAGTCTCTGGTGGATGAGCTGGAA |
| | | ACCGAGACAATCGAGGTGTTCGACTACGAGCAGATGAGGGAAGATTACGG |
| | | CCTGTGA |
| | | (SEQ ID NO: 163) |
| | TnsC | ATGAATCAAGAGAAAGAGGCCAAGGCTATCGCCCAGCAGCTGGGAAACAT |
| | | CCCTCTGAACGACGAGAAGATCCAGGTGGAAATCCAGCGGCTGAACCGGA |
| | | AGAACTTCGTGCCCCTGGAACAAGTGAAGGCCCTGCACGATTGGCTGGAA |
| | | AGCAAGAGACAGGCCCGGCAGTGCTGTAGAGTGATCGGCGAAAGCAGAAC |
| | | CGGCAAGACCATGGCCTGCAACGCCTACAGACTGCGGCACAAGCCTATCC |
| | | AGCAACTGGGCCAGCCTCCTATCGTGCCCGTGGTGTACATCCAGATTCCT |
| | | CAAGAGTGCAGCCCCAAAGAACTGTTCAGCGTGGTCATCGAGCACCTGAA |
| | | GTACCAAGTGACCAAGGGCACCACCGCCGAGATCAGAAACAGAACCCTGC |
| | | GGGTGCTGAAAGGCTGCGGCGTGGAAATGCTGATCATCGACGAGGCCGAC |
| | | CGGCTGAAGCCTAAGACCTTTGCTGACGTGCGGGACATCTTCGACAACCT |
| | | GGAAATCTCCGTGGTGCTCGTGGGCACCGACAGACTGGACAAAGTGATGA |
| | | CCAACGACGAGCAAGTGTGCAACAGATTCAGCGCCAGCTACAGATACGGC |
| | | AAGATCAGCGGCGAGGAATTCAAGCGGACCGTGAACATCTGGGAGAACCA |
| | | GGTGCTGAAGCTGCCCGTGCTGAGCAATCTGACCCAGCCTAAGATGCTGG |
| | | AAATCCTGAGAAACAAGACCCAGGGCTACATCGGCCTGATGGACATGATC |
| | | CTGAGGGACGCCGCTATCAGAGCCCTGAAGAAAGGCATGCCCAAGATCGA |
| | | CCTGGACACCCTGAAAGAAGTGACGAACGAGTACACAGCCCCTCCAAAGA |
| | | CACAGAAGTGA |
| | | (SEQ ID NO: 164) |
| | TniQ | ATGAAGACCAGCGACTTCCAGCCTTGGCTGTTCTGCGTGGAACCTTTCGA |
| | | GGGCGAGAGCATCAGCCACTTTCTGGGCAGATTCAGACGGGCCAACGAGA |
| | | TGACCCCTAACGGACTGGCTAAAGCCGCTGGACTGGAAGGCGCCATTGCC |
| | | AGATGGGAGAAGTTCCGGTTCAACCCTCCACCTAGCCGGCAGCAACTGGA |
| | | AGCTCTGGCTGTGCTTGTTGGCCTGGAAGCCGATAGACTGGTGCAGATGC |
| | | TGCCTCCTGTTGGCGTGGGCATGAAGATGGAACCCATCAGACTGTGCGGC |
| | | GCCTGCTATGCCCAGTCTCCTTGTCACAAGATCGAGTGGCAGTTCAAGAG |
| | | CACCCAGGGCTGTGTGGGCGATAGCCACAGACACAAGCTGAGCCTGCTGA |
| | | GCGAGTGCCCTAATTGCGGCGCCAGATTCAAGATCCCCGCTCTGTGGGTT |
| | | GACGGCTGGTGCCACAGATGCTTTCTGCCCTTCGAGGAAATGACCAAGCA |
| | | CCAGAAACTGATCCAGGTGTAG |
| | | (SEQ ID NO: 165) |
| | LE | TTGCCTCCAATCGTCAGCAACGCTCACATCCATAAAGTTGCTAATTTTCC |
| | | ATCAACTCAGCTTACGACACCGAGAATTTGCAGAGGTACTAATTTGTCGA |
| | | TTGCCACATTATTTGTCCACTTGCCAAATTATTGACCGCTAATTCTAATA |
| | | GCTTGCTAGCCTAATCTACACAAGGGTTACAGCTATTAAATCTCCTAAAA |
| | | ATATTGAATAAGCTTTTTGACAAATTAGTTGTCCGGTTTATGAAACTTGA |
| | | CAAATTCTTTGTCCTCTCTTGAAAGAGGCGAAAATCACAACTTTTGTAAA |
| | | GAATTGACACAATCTTTGTCCTTAAAAGGATAATACAAACATGATTGTAT |
| | | AAAACAATTGTGTAAATATGCAGGATGATCGCTCCTTGGAAGTACCAATA |
| | | CCTGCTGAAGTAAATGAAATCGTCACTGATTTCTCTGATGATGCAAAGCT |
| | | GATGCAGGAAGTGATCCAGAGTCTTTTGGAACCCTGTGATCGCATTACCT |
| | | (SEQ ID NO: 166) |
| | RE | GTGACAACAACCCTCCTATTACAGGGTGGGTTGGAAGTGATTACTGTCTC |
| | | GATGTGCTGGGCGCGATCGCCCAATAGTTTCAACACCCCTCCCAGCTAGA |
| | | GGCGAGTTGAAAGTAGTCGTGGTACGAGAAGTGGAAGAAAAGGATCGGGC |
| | | TGTTTCAACTTTCCTTCCAGCTAGGGCGGGTTGAAAGTCAATCCCTATAT |
| | | TGTTGGCGGTTTAAGCGCGATCAGTGTTTCAACTCCACTCCTAACAGGAG |
| | | GCAGGTTGAAAGATATGACAAAGTTTGCAAAAGCAAAAGCTTTTGAAGAA |
| | | AAAGGTGGGTTGAAAGGCGCACTTCGTTCGGGATTGTTCCGACTTAGTAA |
| | | TTACAAAGTTAATAGGGTGGAGTTATCATAGAAACTCACAGAAATTCTGC |
| | | CCGGTTGATTAAAGGAAGAACCGACCTATCAAGCGGACACTAATTTGTCA |
| | | AAGCGACATCAATTTGACAACGACGACAAATAATTAGTCAATCGACAAAT |
| | | TTTGTACATTCGCACATTATATGTCGCAATTCTCAAGCCAGGTCGTAACT |
| | | GCTTTTAAAGCCTGAGAACTCAATCGTGTAACCATCGTAGTCTATTTACC |
| | | (SEQ ID NO: 167) |
| LUHJ01000 | TnsB | ATGAGCGGCTTTCACAGCATGGCCGACAGAGAGATCGAGTTCACCGAGGA |
| 061.1/ | | AAGCACCCAGGACAGCGACGCCATCCTGCTGGACAACAGCAACTTCGTGG |
| Anabaena | | TGGACCCCAGCCAGATCATCCTGGCCACAAGCGACAAGCACAAGCTGACC |
| sp. 4-3/T61 | | TTCAACCTGATCCAGTGGCTGGCTCAGAGCCCCACCAGAACCGTGAAGTC |
| | | CGAGAGAAAGCAGGCCATTGCCAACACACTGAGCGTGTCCACCAGACAGG |
| | | TGGAACGGCTGCTGAAGCAGTACAACGAGGACAAGCTGAGAGAGACAGCC |
| | | GGCACCGAGAGAGCCGATAAGGGCAAGCACAGAGTGTCCGAGTACTGGCA |
| | | AGAGTTCATCAAGACCACCTACGAGAAGTCCCTGAAGGACAAGCACCCTA |
| | | TCAGCCCCGCCTCTATCGTGCGGGAAGTGAAGAGACACGCCATCGTGGAC |
| | | CTGGGACTGAAGCCTGGCGATTATCCACACCAGGCCACCGTGTACCGGAT |
| | | CCTGGAACCTCTGATTGCCCAGCACAAGAGAAAGACCAGAGTGCGGAATC |
| | | CTGGCAGCGGCAGCTGGATGACAGTGGTCACAAGAGATGGCCAGCTGCTG |
| | | AGAGCCGACTTCAGCAACCAGATCATTCAGTGCGACCACACCAAGCTGGA |
| | | CATCCGGATCGTGGACATCCACGGCGATCTGCTGAGCGAAAGACCTTGGC |
| | | TGACCACCGTGGTGGATACCTACAGCTCTTGCGTGCTGGGCTTCAGACTG |
| | | TGGATCAAGCAGCCTGGCAGCACCGAAGTTGCCCTGGCTCTGAGACATGC |
| | | CATTCTGCCCAAGCAGTACCCCGACGACTACCAGCTGAACAAGAGCTGGA |
| | | ACGTGTACGGCAACCCCTTCCAGTACTTCTTCACCGACGGCGGCAAGGAC |
| | | TTCAGAAGCAAGCACCTGAAGGCCATCGGCAAGAAACTGGGCTTCCAGTG |
| | | CGAGCTGAGGGACAGACCTCCTGAAGGCGGCATCGTGGAACGGATCTTCA |
| | | AGACCATCAACACCCAGGTGCTGAAGGACCTGCCTGGCTACACAGGCGCC |
| | | AATGTGCAAGAGAGGCCTGAGAACGCCGAGAAAGAGGCCTGTCTGACCAT |
| | | CCAGGACCTGGACAAGATCCTGGCCTCCTTCTTCTGCGACATCTACAACC |
| | | ACGAGCCGTATCCTAAAGAGCCCCGGGACACCAGATTCGAGCGGTGGTTT |
| | | AAAGGCATGGGCGAGAAGCTGCCCGAGCGGCTGGATGAGAGAGAGCTGGA |
| | | TATCTGCCTGATGAAAGAAACCCAGAGAGTGGTGCAGGCCCACGGCAGCA |
| | | TCCAGTTCGAGAACCTGATCTACAGAGGCGAGTCTCTGAAGGCCCACAAG |
| | | GGCGAGTACGTGACCCTGAGATACGACCCCGACCACATCCTGACACTGTT |
| | | CGTGTACAGCTGCGAGACAGACGACAACCTGGAAGAGTTCCTGGGCTATG |
| | | CCCACGCCGTGAACATGGACACACACGACCTGAGCCTGGAAGAACTGAAA |
| | | ACCCTGAACAAAGAGCGGAGCAAGGCCCGGAAAGAGCACTTCAATTACGA |
| | | CGCCCTGCTGGCCCTGGGCAAGAGAAAAGAACTGGTGGACGAGCGGAAGG |
| | | CCGACAAGAAAGAGAAGAGGCACAGCGAGCAGAAGCGGCTGAGAAGCGCC |
| | | AGCAAGAAGGACAGCAACATCATCGAGCTGCGGAAGTCCCGGGTGTCCAA |
| | | GAGCCTGAGAAAGCAAGAGACTCAAGAGATCCTGCCTGAGAGAGTGTCCA |
| | | GGGAAGAGATCAAGTTTGAGAAGATCGAACTCGAGCCCCAAGAAACCCTG |
| | | AGCGCTAGCCCCAAGCCTAATCCTCAAGAGGAACAGAGACACAAGCTGGT |
| | | GCTGAGCAAGAGGCAGAAGAACCTGAAGAACATCTGGTGA |
| | | (SEQ ID NO: 168) |
| | TnsC | ATGGCCAGATCTCAGCTGGCCAACCAGCCTATCGTGGAAGTGCTGGCTCC |
| | | TCAGCTGGACCTGAATGCCCAGATCGCCAAGGCCATCGACATCGAGGAAA |
| | | TCTTCCGGAACTGCTTCATCACCACCGACCGGGTGTCCGAGTGCTTCAGA |
| | | TGGCTGGACGAGCTGCGGATCCTGAAGCAGTGCGGCAGAATCATCGGCCC |
| | | CAGAAACGTGGGCAAGAGCAGAGCTGCCCTGCACTACAGAGATGAGGACA |
| | | AGAAACGGATCAGCTACGTGAAGGCTTGGAGCGCCAGCAGCAGCAAGAGA |
| | | ATCTTCAGCCAGATTCTGAAGGACATCAACCACGCCGCTCCTACCGGCAA |
| | | GAGACAGGATCTCAGACCTAGACTGGCCGGCAGCCTGGAACTGTTCGGAC |
| | | TGGAACTGGTCATCATCGACAACGCCGACAACCTGCAGAAAGAGGCCCTG |
| | | ATCGACCTCAAGCAGCTGTTCGAGGAATGCCACGTGCCAATCGTGCTGAT |
| | | CGGCGGCAAAGAGCTGGACAACATTCTGCAGGACTGCGACCTGCTGACCA |
| | | ACTTTCCCACACTGTACGAGTTCGAGCGGCTGGAATACGACGACTTCAGA |
| | | AAGACCCTGAGCACCATCGAGCTGGATATCCTGAGCCTGCCTGAGTCTAG |
| | | CCATCTGGCCGAGGGCAACATCTTCGAGATCCTGGCCGTGTCTACCAGCG |
| | | GCAGGATGGGCATCCTGGTCAAGATCCTGACAAAGGCCGTGCTGCACAGC |
| | | CTGAAGAACGGCTTCGGAAGAGTGGACGAGAGCATCCTGGAAAAGATCGC |
| | | CAGCAGATACGGCACCAAATACGTGCCCCTGGAAAACCGGAACCGGAACG |
| | | AGTAA |
| | | (SEQ ID NO: 169) |
| | TniQ | ATGGTGCAGAATATGTTCCTGAGCAAGACCGAGACAGGCATGAACGAGGA |
| | | CGACGAGATCAGACCCAAGCTGGGCTACGTGGAACCTTACGAGGGCGAGA |
| | | GCATCAGCCACTACCTGGGCAGACTGCGGAGATTCAAGGCCAACAGCCTG |
| | | CCTAGCGGCTACAGCCTGGGAAAGATTGCTGGACTGGGCGCCGTGACCAC |
| | | CAGATGGGAGAAGCTGTACTTCAACCCATTTCCTAACCGGCAAGAGCTGG |
| | | AAGCCCTGGCCTCTGTTGTGGGAGTGTCTGCCGAGCGGTTCATCGAGATG |
| | | CTGCCTCCAAAGGGCGTGACCATGAAGCCCAGACCTATCAGACTGTGCGC |
| | | CGCCTGTTATGCCGAGGTGCCCTGTCACAGAATCGACTGGCAGTTCAAGG |
| | | ACAAGATGAAGTGCGACCGGCACAACCTGCGGCTGCTGACCAAGTGCACC |
| | | AACTGCGAGACACCCTTTCCTATACCTGCCGATTGGGCCCAGGGCGAGTG |
| | | TCCTCACTGTAGCCTGAGCTTCGCCAAGATGGTCAAGCGGCAGAAACTGC |
| | | GGTGA |
| | | (SEQ ID NO: 170) |
| | LE | TTTATTTTCTTGTATTTATAAGCACATAAGTAAAAATAAGTATTCTATGT |
| | | ATACCTAGTGATATAAGAATACACATATTTAACAAGATATATGAATAAAA |
| | | TTTTGATAAATTTTCTGTAAAAACAGTGAATATACTTAATTTTTAATTAA |
| | | ATTTTCCAAATTCAGGACTTTCAAGATATTGACATTTCTGTGGTTAGTAT |
| | | TATACCGTCCCAATATTCAGATTCCAAAACATTAGTTTCTCTTCCATTCG |
| | | CAAATTGAGGAAGCACAGACGGCACAAACCGATAATTATCAGAGTCAAAA |
| | | ATCGACAAAAGGATGATTGAAAAGTGTACATTCGCAAATTAAATGTCGCT |
| | | TTTCGCAAACAATGTCGCAACTGTATTGAATGGCTGAAAGCTACATCGTG |
| | | TAAATATTATAGGTCATTTATCTCTAAGACAGGCTAATTTGCTTGTTTCG |
| | | CATATTATATGTCGCATAATCACGTTTTTGCAAATTAAATGTCGTTTGTT |
| | | AAAGTTGGTGACTTTTGCAAATTAAATGTCGTATTCTTTATGAATATATG |
| | | GTACATTAGTACCTTAATTACTCATGAGTGGGTTTCACTCTATGGCAGAC |
| | | (SEQTDNO: 171) |
| | RE | AGTTTCAACGACCATCCCGGCTAGGGGTGGGTTGAAAGACTTAGATAATC |
| | | AATCCTAGAAAAAACGCTCTTAGTTTATCCGTCTTTGCGCTACAAAAATC |
| | | TTGTCAAATGGGGTAGGGTTGAAAGGTGCATCCGACTTGTAAGCGTATTA |
| | | AACCTTAAAAACATAAAACAAAAAATTAAAACTTATTTAATTCTGATTTT |
| | | TTATATGTAAGAATTAGGTTCTGCACAACCATCAATTCACTTGTTGAAGT |
| | | AATATTATTGTGTTAACACTTGCTTGTAAGCAACACTGTAACAATCTAGA |
| | | AGGAAAAAACGACATTAATGTGCGAAAACCTAGCATAACTAAATTGATTA |
| | | TAAAAAATAGCCGAAGCGACATCAATTTGAGAAAACCGACACTAAATTGC |
| | | GAAAAGCGACATTTAATTTGCGAATGTACAGATTGAAAAGCCAGCAGTCG |
| | | GATTTGAACCGACGACCTTCCGATTACAAGTCGGATGCACTACCACTGTG |
| | | CTATGCTGGCAAATTAGGTGATGCGTTTGAATCATTCACCGATTTCTAAT |
| | | TATAGCACAACAAAATTATTTGTCTAGTCCTGATTTGATTTTTCTCTAGG |
| | | GTTGATGGTTGACTGGAGTTTCTTCTCCCTCCACTTCCCCCACTTCCCCC |
| | | ACTCCCCAGCGTTGCCAAGATGTAGAAATTCTCAAAAATCAGTGATGGCA |
| | | AAACCTCACAAACTTGATAAATTAATAGGCATAGCAAAATCAGCTAGAGC |
| | | CTAGACTTGAAGAAAAAACATTGAGTACAGTTGCCAAACTGTATTTTTTT |
| | | TTGACTAGCAGTATAGAATTGTTCTTTACAGATTCAAAAGCATGGCAACA |
| | | TTGTTTGGACGCGATTTGTTAAGTCTGGCGGACTTGAATCCTACAGAACT |
| | | (SEQ ID NO: 172) |
| KV878783.1/ | TnsB | ATGAACACCGGCAATCAAGAGGCCCACGCCGTGATCACCGACTTCAGCGA |
| Spirulina | | GGAAGAACGGCTGAAGCTGGAAGTGATCCAGAGCCTGATGGAACCCTGCG |
| major PCC | | ACCACGCCACATATGGCCAGAAGCTGAAAGACGCCGCTCAGAAGCTGGGC |
| 6313/T63 | | AAGAGCAAGAGAACCGTGCAGAGACTGGTGCAGCAGTGGGAAGAAATGGG |
| | | ACTCGCCGCCGTGACATCTAAGGCCAGAGCCGATAAGGGCAAGCACCGGA |
| | | TCTCTCAAGAGTGGCAGGACTTCATCGTGAAAACCTACCGGCTGGGCAAC |
| | | AAGGGCAGCAAGCGGATGAGCAGAAAACAGGTGGCCCTGAGAGTGCAGGC |
| | | TAGAGCCGCTGAGCTGGGCGAGAAGATGTACCCCAACGAGCGGACCGTGT |
| | | ACAGAGTGCTGCAGCCTATCATCGAGGCCCAAGAACAGAAAAAGAGCGTG |
| | | CGGAGCGCTGGCTGGCGGGGAGATAGACTGAGCGTGAAAACACGGACCGG |
| | | CAACGACCTGGTGGTCGAGTACACCAATCAAGTGTGGCAGTGCGACCACA |
| | | CCTGGGTCGACGTGCTGGTGGTTGACGTGGAAGGCAACATCATCGGCAGA |
| | | CCCTGGCTGACCACCGTGATCGACACCTACAGCAGATGCATCCTGGGCAT |
| | | CAGACTGGGCTTCGATGCCCCTAGTTCTCAGGTGGTGGCTCTGGCTCTGA |
| | | GACACGCCATGCTGCCTAAGCAGTACCCTCCTACATTCGGCCTGCAGTGC |
| | | GAGTGGGGCACATACGGCAAGCCCGAGTACTTCTACACCGACGGCGGCAA |
| | | GGACTTCAGAAGCGAGCACCTGAGACAGATCGGCATCCAGCTGGGGTTTA |
| | | CCTGCGAGCTGAGAGACAGACCTTCTGAAGGCGGAGCCGTGGAAAGACCT |
| | | TTCGGCACCCTGAACACCGAGCTGTTCTCTACCCTGCCTGGCTACACCGG |
| | | CAGCAACATCCAAGAAAGACCCGAGGACGCCGAGAAGGACGCCAGAATGA |
| | | CACTGAGAGATCTGGAACAGCTGATCGTGCGCTACCTGGTGGACAACTAC |
| | | AACCAGCGGCTGGACAAGAGAATGGGCGACCAGACCAGATACCAGAGATG |
| | | GGAGTCTGGCCTGCTGGCCACACCAGCTCTGCTGTCTGAGAGAGAGCTGG |
| | | ACATCTGCCTGATGAAGCAGACCAACCGGTCCATCTACAGAGAGGGCTAC |
| | | ATCAGATTCGAGAACCTCATGTACAAGGGCGAGTACCTGGCCGGCTATGT |
| | | GGGCGAAAGAGTGGTGCTGAGATACGACCCCAGAGACATCACCACAGTGC |
| | | TGGTGTACCGGCGCGAGAAGTCCCAAGAAGTGTTCCTGGCCAGAGCTTAC |
| | | GCCCAGGACCTGGAAACAGAGCAGCTGACCCTGGAAGATGCCAAGGCCAT |
| | | CAACAAGAAGATCCGCGAGAAGGGCAAGACCATCAGCAACCGCAGCATCC |
| | | TGGACGAAGTGCGGGACAGAGATCTGTTCGTGTCCAAGAAAAAGACGAAG |
| | | AAAGAGCGCCAGAAAGAGGAACAGACCCGGCTGTTCACCCCTGTGACAAC |
| | | CCCTAACAGCAAGCAAGAAACCGAGGAAGAGGAAATCGAGCCCGTCGAGA |
| | | AGATCGACGAGCTGCCCCAGGTGGAAATCCTGGACTACGATGAGCTGAAC |
| | | GACGACTACGGCTGGTGA |
| | | (SEQ ID NO: 173) |
| | TnsC | ATGATGGCCAGCGCCGAGTCTAAGGCCAAAGCTGAAGCTGTGGCTCAGCA |
| | | GCTGGGCAACTTCGAGAAAACCGAAGAGGACCTGGCCAAAGAGATCCAGC |
| | | GGCTGCGGAGAAGAAACGTGGTGCAGCTGGAACAAGTGAAGCAGCTGCAC |
| | | AACTGGCTGGAAGGCAAGCGGAGAAGCAGACAGTGCTGTAGAGTCGTGGG |
| | | CGAGAGCAGAACCGGCAAGACCATCGGCTGCAACGCCTACAGACTGCGGC |
| | | ACAAGCCCATCCAAGAGACAGGCAAGCCTCCTATCGTGCCCGTGGTGTAC |
| | | ATTGAGCCTCCACAGGATTGCGGCAGCATCGACCTGTTCAGAGCCATCAT |
| | | CGAGTACCTGAAGTACAAGGTGCAGAGCCGCGAGAAAGTGCGCGAGCTGA |
| | | GATCCAGAGCCATGAAGGTGCTGGAACGGTGCCAGGTGGAAACCCTGATC |
| | | ATCGACGAGGCCGACAGACTGAAGCCCAAGACCTTTGCCGACGTGCGGGA |
| | | CATCTTCGACAAGCGGAATATCAGCGTGGTGCTCGTGGGCACCGACAGGC |
| | | TGGACAATGTGATCAAGCGGGACGAACAGGTGCACAACAGATTCCGGGCC |
| | | TGCTACAGATTCGGCAAGCTGACCGGCACCGAGTTCGAGCAGGTTGTGAA |
| | | GATCTGGGAGAGAGACATCCTGCGGCTGCCCATTCCTAGCAACCTGCACG |
| | | CCAAGAACATGCTGAAGATCCTCGGACAGGCCACCGGCGGCTATATCGGA |
| | | CTGCTGGATATGATCCTGCGGGAAACCGCCGTCAGAGCCCTGGAAAAAGG |
| | | CCTGGGCAAGATCAACCTGGAAACACTGAAAGAGGTGGCCGAAGAGTACA |
| | | GCTGA |
| | | (SEQ ID NO: 174) |
| | TniQ | ATGAACGACTGGGAGATCCAGCCTTGGCTGTTCGTGGTGGAACCTTACGA |
| | | GGGCGAGAGCCTGTCTCACTTCCTGGGCAGATTCAGAAGAGAGAACGATC |
| | | TGACCCCTGCCGGCCTGGGAAGAGAGGCTGAAATTGGAGCCGTGGTGTCC |
| | | AGATGGGAGAAGTTCCGGCTGATCCCATTTCCTAGCCAGAGAGAGCTGGA |
| | | AAAGCTGGCCCAGGTGGTGCAAGTGGATGCCGCTAGACTGAGAGTGATGC |
| | | TGCCTCCTGATGGCGTGGGCATGAAGATGACCCCTATCAGACTGTGCGGC |
| | | GCCTGCTACAGAGAAGTGCGGTGCCACAGAATGGAATGGCAGTACAAGAC |
| | | CAGCGACCGCTGCGACAAGCACCCTCTGAGACTGCTGAGCGAGTGCCCTA |
| | | ATTGCGGCGCCAGATTTCCCATTCCAAGCCTGTGGCAGGATGGCTGGTGC |
| | | ACCCGGTGCTTTACCACCTTTGGAGAGATGGCCGAGAGCCAGAAACCTCT |
| | | GTGA |
| | | (SEQ ID NO: 175) |
| | LE | TTGGCGTGGTCGATCAGTTCTGAACTGTCTGCCCCCACACTGCCCCCAAA |
| | | ATCTTGATTTTAATGACATTTTTTTTCCAATTTTAGGGTGTGGGTGTCGA |
| | | TTGACTCATTAACTGACATCTTGACAAATTATTTGTCATTGCTATAGACA |
| | | AGCCTGCAACCCTTACTATACATAAGGTTGTGGGCTTTTTGCATTGGAAA |
| | | TTTACTCAAAAGCAAAATTGACAAATTAGGTGTCGTATATTAGGAGTTTG |
| | | CCAAAATATGTGTCGCTTTTCATTTAGTCCAGATTTTCTGGCTTTTTGAC |
| | | ACATTCTGTGTCGCTCAGGGTAAAATAACAACATGTTTGTATTAAACACA |
| | | TTTGTTGTAAATGAATACAGGTAATCAAGAAGCTCATGCAGTTATCACTG |
| | | ACTTCTCTGAGGAGGAGAGGTTAAAACTAGAAGTTATCCAGAGTTTGATG |
| | | GAACCCTGTGATCACGCTACCTATGGACAAAAGTTAAAAGATGCGGCTCA |
| | | (SEQ ID NO: 176) |
| | RE | GTTGCTGAAACCATCCCAAGGTGGGATTAGGTTGAAAGAGTAATACAAGA |
| | | ATTGGGTGGATTGAAAGCAAGTCCCACCGTCCCCTACTTTAGTGCAATGC |
| | | AAGATTACACAACAAACTTGCTCTGAATGTATGGAAGGTTCGTAAAAGTG |
| | | GTGACAAATAATTTGTCAAGATGACATCAATTTGACAACGATGACAAATA |
| | | ATTAGTCAATCGACATGTGGGCAACACCGTCAGAACAACTCAGAAAACTC |
| | | TGAAACGATGGGGGTGGTGGGACTTGAACCCACACGTCTTTTTACGGACA |
| | | ACGGATTTTAAGTCCGCAGCGTCTACCATTCCGCCACACCCCCAAGAGCA |
| | | GTGACAGGGTTCTAGTTTAGCAGCAAATGGCGGCCACTGCATGGAACAGA |
| | | ACCCTCAGAAAATCTAATCAATCTGCCTCTTGCGCTCCGATGGGTTGAAT |
| | | TGTTTATGATGGGAGGGCGTTTGCTACTGCGTTGGTGACTGCCAATATCG |
| | | (SEQ ID NO: 177) |
| RSCM0100 | TnsB | ATGCTGGAAACCCAGGACAACAAGCCCAACGACGACGAAGTGAAGGGCAG |
| 0009.1/ | | CGACATCATCACCGAACTGTCTGCCGGCGACAAAGAGCTGCTGGAACTGA |
| Trichormus | | TCCAGAAGCTGCTCGAGCCCTGCGACAGAACCACATACGGCGAGAGACAG |
| variabilis | | AGAGAGGTGGCCGCCAAGCTGGGAAAGTCTGTGCGGACAGTTAGACGGCT |
| SAG 1403- | | GGTCAAGAAGTGGGAAGAACAGGGACTTGCCGGCCTGCAGACAACCCAGA |
| 4b/T64 | | GAGCCGATAAGGGCAAGCACCGGATCGATAGCCAGTGGCAGAAGTTCATC |
| | | ATCAACACCTACAAAGAGGGCAACAAGGGCAGCAAGCGGATCACCCCTCA |
| | | GCAGGTTGCCATTAGAGTGCAGGCCAAAGCCGCTGAGCTGGGCGACGAGA |
| | | ATTACCCCAGCTACCGGACCGTGTACAGAGTGCTGCAGCCCATCATCGAG |
| | | GAACAAGAGCAGAAGGCCGGCGTCAGAAACAGAGGCTGGCGAGGCTCTAG |
| | | ACTGAGCCTGAAAACCAGAGATGGCCTGGACCTGAGCGTGGAATACTCCA |
| | | ACCACATCTGGCAGTGCGACCACACCAGAGCCGATCTGCTGCTGGTTGAT |
| | | CAGCACGGCGAACTGCTGGCCAGACCTTGGGTCACCACAGTGATCGACAC |
| | | CTACAGCCGGTGCATCATCGGCATCAACCTGGGCTTTGATGCCCCTAGCT |
| | | CTCAGGTGGTGGCTCTGGCTCTGAGACACGCCATCCTGCCTAAGAAGTAC |
| | | GGCAGCGAGTACGGCCTGCACGAGGAATGGGGCACATATGGCAAGCCCGA |
| | | GCACTTCTTTACCGACGGCGGCAAGGACTTCAGAAGCAACCATCTGCAGC |
| | | AGATTGGCGTGCAGCTGGGCTTCGCCTGCCATCTGAGAGATAGACCTAGC |
| | | GAAGGCGGCATCGTGGAAAGACCTTTCGGCACCCTGAACACCGACCTGTT |
| | | TTCTGCCCTGCCTGGCTACACCGGCAGCAACGTGCAAGAAAGACCTGAGG |
| | | AAGCCGAGAAAGAGGCCTGTCTGACCCTGAGAGAGCTGGAAAGACTGATC |
| | | GTGCGGTACATCGTGGACAAGTACAACCAGAGCATCGACGCCAGACTGGG |
| | | CGATCAGACCCGGTATCAGAGATGGGAGGCCGGACTGATTGTGGCCCCTA |
| | | GCCTGATCAGCGAAGAGGACCTGAGAATCTGCCTGATGAAGCAGACCCGG |
| | | CGGAGCATCTACAGAGGCGGCTATCTGCAGTTCGAGAACCTGACCTACCG |
| | | GGGCGAAAATCTGGCCGGATATGCCGGCGAAAGCGTGGTGCTGAGATTCG |
| | | ACCCCAAGGACATCACCACCATCCTGGTGTACAGACAGACCGGCAGCCAA |
| | | GAAGAGTTCCTGGCCAGAGCCTACGCTCAGGACCTGGAAACCGAAGAACT |
| | | GTCCCTGGATGAGGCCAAGGCCATGAGCAGAAGAATCCGGCAGGCCGGAA |
| | | AAGAGATCAGCAACAGATCCATCCTGGCCGAAGTGCGGGACCGCGAGACA |
| | | TTCGTGAAGCAGAAAAAGACCAAGAAAGAGCGCCAGAAAGAGGAACAGGT |
| | | CGTCGTCGAGAAAGTGAAGAAACCCGTGATCGTGGAACCCGAAGAGATCG |
| | | AGGTGGCCAGCGTGGAAACAGTGTCCGAGCCTGATATGCCCGAGGTGTTC |
| | | GACTACGAGCAGATGCGCGAGGACTACGGCTGGTAA |
| | | (SEQ ID NO: 178) |
| | TnsC | ATGACATCTCAGCAGGCCGAGTCTGTGGCCCAAGAGCTGGGAGACATCCC |
| | | TCAGAACGACGAGAAGCTGCAGGCCGAAATCCAGCGGCTGAACAGAAAGA |
| | | GCTTCATCCCTCTGGAACAAGTGAAGATGCTGCACGACTGGCTGGACGGC |
| | | AAGAGACAGAGCAGACAGTCTGGCAGAGTGCTGGGCGAGAGCAGAACCGG |
| | | CAAGACCATGGGCTGTGACGCCTACAGACTGCGGCACAAGCCTAAGCAAG |
| | | AGCCCGGCAAACCTCCTACAGTGCCCGTGGCCTACATCCAGATTCCTCAA |
| | | GAGTGCAGCGCCAAAGAGCTGTTCGCCGCCATCATCGAGCACCTGAAGTA |
| | | CCAGATGACCAAGGGCACCGTGGCCGAGATCAGAGACAGAACCCTGAGAG |
| | | TGCTGAAAGGCTGCGGCGTGGAAATGCTGATCATCGACGAGGCCGACCGG |
| | | TTCAAGCCCAAGACCTTTGCTGAAGTGCGGGACATCTTCGACAAGCTGGA |
| | | AATCGCCGTGATCCTCGTGGGCACCGATAGACTGGATGCCGTGATCAAGC |
| | | GGGACGAACAGGTGTACAACCGGTTCAGGGCCTGCCACAGATTTGGCAAG |
| | | TTCAGCGGCGAGGACTTCAAGCGGACCGTGGAAATCTGGGAGAAACAGGT |
| | | GCTGAAGCTGCCTGTGGCCAGCAACCTGTCTAGCAAGGCCATGCTGAAAA |
| | | CCCTGGGCGAAGCCACAGGCGGCTATATCGGACTGCTGGACATGATCCTG |
| | | AGAGAGAGCGCCATTCGGGCCCTGAAGAAGGGCCTGTCTAAGATCGACCT |
| | | GGAAACCCTGAAAGAAGTGACCGCCGAGTACAAGTGA |
| | | (SEQ ID NO: 179) |
| | TniQ | ATGGAAGTGGGCGAGATCAACCCATGGCTGTTCCAGGTGGAACCCTATCC |
| | | TGGCGAGAGCCTGTCTCACTTCCTGGGCAGATTCAGACGGGCCAACGATC |
| | | TGACCACAACCGGCCTGGGAAAAGCCGCTGGTGTTGGCGGAGCTGTGGCC |
| | | AGATGGGAGAAGTTCAGATTCAACCCTCCACCTAGCCGGCAGCAGCTGGA |
| | | AGCCGTGGCTAAAGTCGTGGGAGTCGACGCCGATAGACTGGAACAGATGC |
| | | TTCCTCCTGCCGGCGTGGGCATGAACCTGGAACCTATTAGACTGTGCGCC |
| | | GCCTGCTACGTGGAAAGCCCTTGTCACAGAATCGAGTGGCAGTTCAAAGT |
| | | GACCCAGGGCTGCCAGCACCACCACCTGTCTCTGCTGAGCGAGTGCCCTA |
| | | ATTGCGGCGCCAGATTCAAGGTGCCAGCTCTGTGGGTTGACGGCTGGTGC |
| | | CAGAGATGCTTTCTGCCCTTTGGCGAGATGGTGGAACACCAGAAGGGCAT |
| | | CTGA |
| | | (SEQ ID NO: 180) |
| | LE | ATCGCTCTTTCCCTATCAAATTATACTAGAAAAAGTGAATCTTCCTGTGC |
| | | TGATAACAACAACATAAACTGCTTCCCCTGACCTGAAGGTTTCAACGGTT |
| | | CCTAGAAGACCAAGAAATTAATAAAAATAGTAAAAATCAACATTCTAGTG |
| | | CCTTGTTTACCATGCATAGTGGTCGTATCGCTTGGCAGGACGAACAAGGC |
| | | AAGTGAGAACCCTGGAATATTATTTTGTCGCTTGTCAAATTAAATGACCA |
| | | CTTGACAAATTAATGTCCACAAATATATTAACCGCTAAACCCTTACACAG |
| | | TGAGGGTTTTAATATTTTAGCCTATTTTTAGCCAGTCAGATACTAATTGA |
| | | CAAAATAACTGTCCGAACTTGAATATTTGACAAATTAATTGTCCTGTATT |
| | | GAAAATCCCTATTTTTCCAATTTTTCCAGACTTGACAAATTAATTGTCCT |
| | | TTTATACAGTACAATACAACTATGTTTGTAATAAACATATATGCTAGAAA |
| | | CTCAAGATAATAAACCCAATGATGATGAGGTAAAAGGTAGTGACATTATC |
| | | ACCGAACTATCCGCAGGTGATAAGGAACTATTGGAACTAATCCAAAAATT |
| | | (SEQ ID NO: 181) |
| | RE | GTTTCAACACCCCTCCCGAAGTGGGGCGGGTTGAAAGTCTAAATTTTGTC |
| | | TTCTGTTTCAGAGCCTAATAAATTAAAACACTGTTATAAAATTAAGGTGG |
| | | GTTGAAAGGAGTGCTGCGATCGTACACAACATAAGTTATGTGTATTACCT |
| | | GGAGATAAAATTTAAGGACAAATAATTTGGCAGCACGGACAGCAATTTGG |
| | | CAAGACGGACAACAATTTGTCAACGCGGACAAATTATTTGGCAAGTGACA |
| | | ACAATTTATAATGGAGAATAGGAGACTCGAACCCCTGACCTCTGCGGTGC |
| | | GATCGCAGCACTCTACCAACTGAGCTAATTCCCCTTGTGAGTGCAGAGTA |
| | | GCAAACTCTGACAGACGTACTCTATCTTAACACTCAGGCACGGCAGATTT |
| | | TACATCTTTTTGCAAATACACCTGCTGCACCCGTTCCAATTCCAAATCAG |
| | | TCAAATAATCTACAGTCCAGTTGGCTTGACGCTGAAGCATATGAAAAGGG |
| | | (SEQ ID NO: 182) |
| CP012036.1 | TnsB | ATGCCCGACAAAGAGTTTGGACTGACCGGCGAGCTGACCCAAGTGACAGA |
| /Nostoc | | AGCCATCCTGCTGGGCGAGAGCAACTTCGTGGTGGACCCTCTGCACATCA |
| piscinale | | TCCTGGAAAGCAGCGACAGCCAGAAGCTGAAGTTCAACCTGATCCAGTGG |
| CENA21/ | | CTGGCCGAGTCTCCCAACAGACAGATCAAGAGCCAGCGGAAGCAGGCCGT |
| T65 | | GGCCGAGACACTGAGCATCAGCACAAGACAGGTGGAACGGCTGCTGAAAG |
| | | AGTACAACGAGGACCGGCTGAACGAGACAGCTGGCGTGCAGAGAAGCGAC |
| | | AAGGGCAAGCACAGAGTGTCCGAGTACTGGCAGCAGTACATCAAGACCAT |
| | | CTACGAGAACAGCCTGAAAGAGAAGCACCCTATCAGCCCCGCCTCTGTCG |
| | | TGCGGGAAGTGAAGAGACACGCCATCGTGGATCTGGGACTCGAGCAGGGC |
| | | GATTACCCTCATCCTGCCACCGTGTACCGGATCCTGAATCCTCTGATCGA |
| | | GCAGCAGCAGCGGAAGAAGAAGATCAGAAACCCTGGCAGCGGCAGCTGGC |
| | | TGACCGTGGAAACAAGAGATGGCAAGCAGCTGAAGGCCGAGTTCAGCAAC |
| | | CAGATCATCCAGTGCGACCACACCGAGCTGGACATCCGGATCGTGGACAA |
| | | CAATGGCGTGCTGCTGCCCGAAAGACCTTGGCTGACAACCGTGGTGGATA |
| | | CCTTCAGCAGCTACGTGCTGGGCTTTCACCTGTGGATCAAGCAGCCTGGA |
| | | AGCGCCGAAGTTGCCCTGGCTCTGAGACACAGCATCCTGCCTAAGCAGTA |
| | | CCCCAACGACTACGAGCTGAGCAAGCCTTGGGGCTACGGCCCTCCATTCC |
| | | AGTACTTTTTCACCGACGGCGGCAAGGACTTCAGATCCAAGCACCTGAAA |
| | | GCCATCGGCAAGAAACTGGGATTTCAGTGCGAGCTGCGGGACAGACCTAA |
| | | TCAAGGCGGCATCGTGGAACGGATCTTTAAGACCATCAACACCCAGGTGC |
| | | TGAAGGACCTGCCTGGCTACACAGGCAGCAACGTGCAAGAGAGGCCTGAG |
| | | AACGCCGAGAAAGAGGCCTGTCTGACCATCCAGGACATCGACAAAGTGCT |
| | | GGCCGGCTTCTTCTGCGACATCTACAACCACGAGCCTTATCCTAAGGACC |
| | | CCAGAGACACCAGATTCGAGAGATGGGTCAAAGGCATGGGCAGAAAGCTG |
| | | CCCGAGCCTCTGGATGAGAGAGAGCTGGATATCTGCCTGATGAAGGAAGC |
| | | CCAGAGAGTCGTTCAGGCCCACGGCAGCATCCAGTTCGAGAACCTGATCT |
| | | ACAGAGGCGAGAGCCTGAAGGCCTACAAGGGCGAGTACGTGACCCTGAGA |
| | | TACGACCCCGATCACATCCTGACAGTGTACGTGTACAGCTGCGAGAGCGA |
| | | CGACAACCTGGAAGAGTTTCTGGGCTACGCCCACGCCATCAACATGGACA |
| | | CACACGACCTGTCTCTGGAAGAACTGAAGGCCCTGAACAAAGAGCGGAGC |
| | | AAGGCCCGGAAAGAGCACTTCAATTACGACGCCCTGCTGGCCCTGGGCAA |
| | | GAGAAATGAACTCGTGGGCAAACGCAAAGAGGACAAGAAAGAGAAACGGC |
| | | GGAGCGAGCAGAAGAGACTGAGATCCACCAGCAAGAAAAACTCCAACGTG |
| | | GTGGAACTGAGAAAGAGCAGAGCCGCCAGCAGCTCCAAGAAGAGATGA |
| | | (SEQ ID NO: 183) |
| | TnsC | ATGGCCAGATCTCAGCTGGCCACACAGCCCATCGTTGAAGCCCTGGCTCC |
| | | TCACCTGTCTCTGAAGGCCCAGATCGCCAAGACCATCGACATCGAGGAAA |
| | | TCTTCCGGACCTGCTTCATCACCACCGACAGAGCCAGCGAGTGCTTCAGA |
| | | TGGCTGGACGAGCTGCGGATCCTGAAGCAGTGCGGCAGAATCATCGGCCC |
| | | CAGAAACGTGGGCAAGAGCAGAGCTGCCCTGCACTACAGAGATGAGGACA |
| | | AGAAACGGGTGTCCTACGTGAAGGCTTGGAGCGCCAGCAGCAGCAAGAGA |
| | | CTGTTCAGCCAGATTCTGAAGGACATCAACCACGCCGCTCCTACCGGCAA |
| | | GAGACAGGATCTCAGACCTAGACTGGCCGGCAGCCTGGAACTGTTCGGAC |
| | | TGGAACTGGTCATCATCGACAACGCCGACAACCTGCAGAAAGAGGCCCTG |
| | | CTGGACCTCAAGCAGCTGTTCGAGGAATGCCACGTGCCAATCGTGCTCGT |
| | | CGGCGGAAAAGAGCTGGACGACATTCTGCAGGACTGCGACCTGCTGACCA |
| | | ACTTTCCCACACTGTACGAGTTCGAGCGGCTGGAATACGACGACTTCAAG |
| | | AAAACCCTGAGCACCATCGAGCTGGATATCATCAGCCTGCCTGAGAGCAG |
| | | CAACCTGAGCGAGGGCAACATCTTCGAGATCCTGGCTGGCTCTACAGGCG |
| | | GCAGGATGGGCATCCTGGTCAAGATCCTGACAAAGGCCGTGCTGCACAGC |
| | | CTGAAGAACGGCTTCTCTAAGGTGGACGAGAGCATCCTGGAAAAGATCGC |
| | | CAGCAGATACGGGACCAAGTACATCCCTCTGGAAAACCGGAACCGGAACG |
| | | AGTGA |
| | | (SEQ ID NO: 184) |
| | TniQ | ATGCTGGTGGTTATGGTGCAGAACATCTTCCTGAGCAAGACCGAGATCGG |
| | | CATGAACGAGGACGAGATCAGACCCAAGCTGGGCTACGTGGAACCTTACG |
| | | AGGGCGAGAGCATCAGCCACTACCTGGGCAGACTGCGGAGATTCAAGGCC |
| | | AACTCTCTGCCCAGCGCCTACAGCCTGGGAAAGATTGCTGATCTGGGCGC |
| | | CGTGACAGGCAGATGGGAGAAGCTGTACTTCAACCCCAGACCTACACAGC |
| | | AAGAGCTGGAAGCCCTGGCCTCTGTGGTGGCCGTGAATGCCGATAGACTG |
| | | ACCGAGATGCTGCCTCCTACCGGCATGACCCTGAAGCCTAGACCTATCAA |
| | | GCTGTGCGCCGCCTGCTATGCCGAGGAACCCTATCACAGAATCGAGTGGC |
| | | AGTACAAAGAACAGCAGAAATGCGTGCGGCACAACCTGCGGCTGCTGACC |
| | | AAGTGCATCAACTGCGAGACACCCTTTCCTATACCTGCCGACTGGGTGGA |
| | | AGGCGAGTGTCCTCACTGTAGCCTGAGCTTCGCCAAGATGGCCAAGCGGC |
| | | AGCGGAGAAACTAA |
| | | (SEQ ID NO: 185) |
| | LE | TGAAGCAAAATTAAAGATTGACTTTTCGAGCCTTTGCGCGAAACAAAATT |
| | | CATTCCCTTAATCAGCAACGCCAATTAAAAAAATCATCTCTAGAAAGAGA |
| | | TTGACAAATAATGTGTCGCCACGGACAAATAATTTGTACATTCGCACGTT |
| | | ATATGTCGCAATTTGCAAATAACGACATGAGCGTTTTTATCATCTAAAAC |
| | | GCTTATTTTATAAAGCTTTCAGAACATTTTTCACTAAAAATATAACATTC |
| | | CTAAATTCGCATATTGAATGTCGCAAACACTAATGTTCGCAAATTAACGC |
| | | CGTTGGTCTAAATTTTGTTACCTTGCAAATTCAATGTCGCATTTTCTTAA |
| | | TTCAATGGTACATTGATACTATCAATAACTACATTCTCCTCACTTAAATG |
| | | CCAGACAAAGAATTTGGATTAACTGGAGAATTGACACAAGTTACGGAAGC |
| | | TATTTTGCTTGGTGAAAGTAATTTTGTGGTCGATCCATTACACATTATTC |
| | | (SEQ ID NO: 186) |
| | RE | AGTTTCAACAAGCATCCCGGCTAAGGGTGGGTTGAAAGGAAATTTTTGTT |
| | | GTTACTAGGTGAGATATTTGTTTCAATTAGGAGGGTTGAAAGGCGCACTT |
| | | CGTTCGGGAATATTCTGAAATTTTTAGCATATTCTACAAGTGTAGTGGGA |
| | | TCACTCCACCACATCACAGTTGCGACATTAATTTGCGAAAAATCAGTATA |
| | | ATTAAATTGACTCTAAAAATAAGTCAAAGCGACGCTAATTTGCAAAAAAA |
| | | CGACATTAATTTGCATATTGCGACACATAATCTGCGAATGTACATCGACA |
| | | CATGCACATCGGGATGACTGGATTCGAACCAGCGGCCCCTTCGTCCCGAA |
| | | CGAAGTGCGCTACCAAGCTGCGCTACATCCCGCTAAAAAAAAGACAATAT |
| | | TTTTATGATTGTACCATAAATATCTGAAAAAAGGAAATATAAAAATCAGC |
| | | TGCTACTGAACTGTATAGATGACCGAACAAGGCAAAAGTAAAAATTTAAA |
| | | (SEQ ID NO: 187) |
| AAXW0100 | TnsB | ATGAAGAACGCCAACTCTCCACCTAGCACCAGCAGCGTGAACAACCCTCT |
| 0027.1/ | | GGAAAAAGAGAACAACGTCATCCCCAGCGAGCTGAGCGACGAGGCCCAAC |
| Cyanothece | | TGAAGCTGGAAGTGATCCAGACACTGCTGAAGCCCTGCGACAGAAAGACC |
| sp. | | TACGGCCAGAGACTGCAAGAGGCCGCCGAGAAGCTGGGCAAGAGCAAGAG |
| CCY0110/ | | AACAGTGCAGCGGCTGGTCAAGAAGTGGGAAGAGAAGGGACTGCAGGCCA |
| T66 | | TTGCCGCCACCGACAGATCTGATAAGGGCAGCTTCCGGATCGAGGAACAG |
| | | CTGCAAGAGTTCATCATCAAGACCTACAAGAACGGCAACAAGGGCAGCAG |
| | | AAGAGTGACCCGGAAACAGGTGTACCTGAAGGCCAAGGCCAAAGCCGAGG |
| | | AACTGGGCATCAATCCTCCAAGCCACATGACCGTGTACCGGATCCTGCAG |
| | | CCTCTGATCGAGAAGCAAGAAAAGAAGAAGTCCATCAGAAGCCCCGGCTG |
| | | GCGGGGATCTCAGCTGTCTGTGAAAACAAGAGCCGGCCAGGACCTGAGCG |
| | | TGGAATACTCCAATCACGTGTGGCAGTGCGATCACACCCTGGCCGATATC |
| | | CTGCTGGTGGATCAGTATGGCGAGCTGCTGGGTAGACCTTGGCTGACCAC |
| | | AGTGATCGACACCTACAGCCGGTGCATCATCGGCATCAACCTGGGCTTCA |
| | | ATGCCCCTAGCAGCCAGATTGTGGCCCTGGCTCTGAGACACGCCATCCTG |
| | | CCTAAGAGATACACCCCTGACTACCAGCTGTCCGAGGAATGGGGCACATA |
| | | CGGCAAGCCCGAGCACTTCTACACCGACAGCGGCAAGGATTTCAGCAGCC |
| | | ACCACATCCAGCAGATCAGCGTGCAGCTGGGCTTCGTGTGCCACTTCAGA |
| | | GACAGACCTAGCGAAGGCGGCATCGTGGAAAGACCCTTCAAGACCCTGAA |
| | | CCTGGAATTCTTCAGCACCCTGCCTGGCTACACCGGCAGCAATGTGCAAG |
| | | AAAGACCCGAGGATGCCGAGAAAGAGGCCTGTCTGACACTGCGGCAGCTG |
| | | GAACAGAAACTCGTGCGGTACATCGTGGACAACTACAACCAGCGGATCGA |
| | | CGCCAGAATGGGCGACCAGACCAGATTCCAGAGATGGGAGTCTGGCCTGA |
| | | TCGCTAGCCCCGATGTGATCAGCGAGAGAGAGCTGGACATCTGCCTGATG |
| | | AAGCAGACCAGACGGAAGGTGCAGAGAGGCGGCTACCTGCAGTTCGAGAA |
| | | CCTGATGTACCGGGGCGAGAATCTGGCCGGATATGCCGGCGAGTCTGTGA |
| | | TCCTGAGATTCGACCCCAGAGATGTGACCACCGTGCTGGCCTACCAGCAA |
| | | GAGTCCAATCAAGAGGTGTTCCTGACCAGAGCCTACGCCATCGACCTGGA |
| | | AACCGAGCAGATGAGCCTGGACGAAGCCAAGGCCTCCTCCAAGAGAGTTA |
| | | GAGAGGCCGGCAAGACCATCAGCAACCGGTCTATCCTGAGCGAGATCAGA |
| | | GCCGCCGAGGGATCTGCCTATGCCGACAGACAGATCTTCCCTAAGGCCAA |
| | | GAAGTCTAAGAAAGAGCGCTACCAAGAGGAACAGAAGGCCATCACCAGCA |
| | | AGCCCCTGGAACAGGTGGAAAGCGAGCTGGAAGAAACCGACGTGTCCAGC |
| | | AGCAGCTCCGAGACATCTCAGGTGGAAGTGTTCGACTACGAAACACTCCA |
| | | AGAGGACTACGGCTTCTGA |
| | | (SEQ ID NO: 188) |
| | TnsC | ATGACCATCCAAGAGGCCCAGGCTGTTGCTCAGCAGCTGGGCGATATCAA |
| | | GCTGACCAGCGAGAAGCTGCAGGCCGAGATCCAGCGGCTGAACAGAAAGA |
| | | CCGTGGTCACCCTGTCTCACGTGGAAGCCCTGCACAATTGGCTGGAAGGC |
| | | AAGAGACAGGCCAAGCAGAGCTGTAGAGTCGTGGGCGAGAGCAGAACCGG |
| | | CAAGACAATCGCCTGCAACGCCTACCGGCTGCGGCACAAGCCTATTCAGA |
| | | CACCTGGCAAGCCTCCAATCGTGCCCGTGGTGTACATCCAAGTGACCCAA |
| | | GAGTGCGGCGCCAAGGATCTGTTTGGCGCCATCATCGAGCACCTGAAGTA |
| | | CCAGATGACCAAGGGCACCGTGGCCGAGATTCGGCAGAGAACCTTTAAGG |
| | | TGCTGCAGAGATGCGGCGTGGAAATGCTGATCATCGACGAGGCCGACCGG |
| | | CTGAAGCCTAAGACCTTTGCTGAAGTGCGGGACATCTTCGACAAGCTGAA |
| | | TATCGCCGTGGTGCTCGTGGGCACCGATAGACTGGATGCCGTGATCAAGC |
| | | GGGACGAACAGGTGTACAACCGGTTCAGAGCCTGCCACAGATTTGGCAAA |
| | | CTGGCCGGCGACGAGTTCAGCCAGACAGTGGATATCTGGGAGAGACAGGT |
| | | GCTGAAGCTGCCCGTGGCCAGCAATCTGAGCAGCAAGCGGATGCTGAAGA |
| | | TCCTCGGACAGGCCACAGGCGGCTATCTGGGACTGCTGGACATGATCCTG |
| | | AGAGAGAGCGCCATTCGGGCCCTGAAGAAGGGCCTGCAGAAGATCGACCT |
| | | GGAAACCCTGAAAGAAGTGACCGAGGAATACCGGTGA |
| | | (SEQ ID NO: 189) |
| | TniQ | ATGGAAAGCAAAGAAATCCAGCCGTGGTGGTTCCTGGTGCAGCCTCTTGC |
| | | CGGCGAGAGCATCTCTCACTTTCTGGGCAGATTCCGGCGCGAGAACGAGC |
| | | TGACCGTGACCATGATGGGCAAGCTGACAGGACTCGGCGGAGCCATTGCC |
| | | AGATGGGAGAAGTTCAGATTCATCCCCGCTCCTACCGAGGAAGAACTGAC |
| | | AGCCCTGTCTGAGGTGGTGCAGGTCGAGGTGGAAAGACTGTGGCAGATGT |
| | | TCCCTCCAAAAGGCGTGGGCATGAAGCACAGACCCATCAGACTGTGCGCC |
| | | GCCTGCTACGACGAGGAAAGATGTCACAAGATCGGCTGGCTGGTGGAAGA |
| | | TGACAGCGTGCTGCTGAAGGCCTGGGTCAACATCGTCGTGGGAATGAGCT |
| | | GA |
| | | (SEQ ID NO: 190) |
| | LE | AACTTCATCACGTGCTTTCTTCCATCCAAGCTGAAAACCATCATGATATT |
| | | TGACTTGAAAAACCCATTCTTTTGGTACGTCCTCAATTACATTGATAGGT |
| | | GTACAGTAACTAATTGTTTGTCGTCTTAACAAAATAGTGTCGTCAAAACT |
| | | TTTAACCTTCAAACTTTTATATAATCTACGTTATAGACTGATCATAACAT |
| | | CAATCTTTTATAAAAGTCATTATTCATCTTATTAACAAATTGACTGTCAT |
| | | TTACCCGAATGGCACTTTTTTTATGGACTGAAGCAATATTAACAAATTAA |
| | | TTGTCTCCAAACTTCAAGGATTGTGATACACTCATATTAAATAAACAATT |
| | | ATGTAATAATCAGACATTGTTGTTCATTATGAAAAATGCAAACTCACCAC |
| | | CCTCTACATCATCAGTTAATAATCCCTTAGAGAAAGAAAATAATGTTATC |
| | | CCCTCTGAGTTATCTGATGAAGCACAATTAAAGCTTGAGGTTATTCAA |
| | | (SEQ ID NO: 191) |
| | RE | CAGCGTCACAATCTATTTTGGTTAATGAGATGGATTGAAAGATTTTTTAC |
| | | CATCGTCTAGGATTAGTCTCGGTAATAGGCACACGACAAATAATATGTTC |
| | | TTAATGACACCCAATTCGTTAAAGCGACAATAATTTGTTACCGATGACAA |
| | | ATAATCAGTTACTGTACAAAACTTTAAATTACAAGTTAATATTATACACA |
| | | CTATAAAAAAATATGGACGTAACTGGACTCGAACCAGTGACCCCATCGAT |
| | | GTCAACGATGTACTCTAACCAACTGAGCTATACGTCCGCACAAGTCTTTA |
| | | CTATAACACAAGATTTACCAAAAACGCAAATAAACAAACAAACTTACATA |
| | | GATTTCCTTAAGAGATGGGGGAGTCGGGGTCATTGGGGAGTGTAATAAAA |
| | | GGACAACCCTTGATTATTGATCATTATATGTACGAGAAACTGACACCCCC |
| | | CACCACTGGTTCTAAAATCACTTTTAAAGACGGTAAACCCATTGTTCCTA |
| | | (SEQ ID NO: 192) |
| JTJD010002 | TnsB | ATGGAACTGGTCAACCCCGACGACCTGAACAGCGTGGAAAGCCGGCTGAA |
| 71.1/ | | GCTGGAAATCATCGAGAAGCTGAGCGAGCCCTGCGACAGAAAGACCTACG |
| Aphanocapsa | | GCGAGAGACTGAGAAGCGCCGCTCAGCAGCTGAAGTGTTCTGTGCGGACA |
| montana | | GTGCAGCGGCTGATGAAGAAGTGGGAAGAAGAAGGCCTGGCCGCTCTGAT |
| BDHKU210 | | CGACAGCGGCAGAATCGATAAGGGCAAGCCCAGAATCGCCGAGGACTGGC |
| 001/T67 | | AGCAGTTCATCAAGAAGGTGTACAGCAACGACAAGTGCACCCCTGCTCAG |
| | | GTGTTCACCAAAGTGCGGAACAAGGCCAGACAAGAGGGCCTGAAGGACTA |
| | | CCCCAGCCACATGACCGTGTACCGGATCCTGAGACTGGTCAAAGAGGCCA |
| | | AAGAGAAAGAGGAATCCATCCGGAACCTCGGCTGGAAGGGATCTAGACTG |
| | | GCCCTGAAAACCAGAGATGGCGAGGTGCTGGAAATTGACTACAGCAATCA |
| | | AGTGTGGCAGTGCGACCACACCAGAGCCGATATCCTGCTGGTGGATAAGT |
| | | ACGGCCACCAGATGGGCAGACCTTGGCTGACCACAGTGAT |
| | | CGACACCTACAGCAGAGCCATCGTGGGCATCAACCTGGGCTACGATGCCC |
| | | CTTCTAGCAGCGTTGTGGCTCTGGCTCTGCGGAACGCCATCATGCCTAAG |
| | | CAGTACGGCGTCGAGTACAAGCTGTACGCCGATTGGCCTACCTGCGGCAC |
| | | ACCTGATCACCTGTTTACCGACGGCGGCAAGGACTTCAGAAGCAACCACC |
| | | TGAGACAGATCGGCCTGCAGCTGGGCTTCATCTGTCACCTGAGAGACAGA |
| | | CCTAGCGAAGGCGGAATCGTGGAAAGACCCTTCGGAACAATCAATACCCA |
| | | GTTCCTGAGCACCCTGCCTGGCTACACAGGCAGCAACGTGCAGGATAGAC |
| | | CTCCTGAGGCCGAAGCCGAAGCCTGTCTGACACTGCAAGAGCTGGAAAAG |
| | | CTGCTGGTCGCCTACATCGTGAATACCTACAACCAGCGGCTGGACGCCAG |
| | | AATGGGCGATCAGACCAGAATTCAGAGATGGGAAGCCGGCCTGCTGAAGC |
| | | AGCCTAGAGTGATCCCTGAGCACGAGCTGCACATCTGCCTGATGCGGCAG |
| | | ACCAGACGGACCATCTACAGAGGCGGCTACCTGCAGTTCGAGAACCTGGC |
| | | CTATAGAGGCGAAGCCCTGGCTGAACATGCCGGCGAGAATATCGTGCTGA |
| | | GATACGACCCCAGAAATATCGCCCAGGTGCTGGTGTACAGACACGACCCC |
| | | GACAGAGAAGTGTACCTGGGAGTTGCCCAGGCTCTGGAATTCGAGGGCGA |
| | | AGTGCTGGCCCTGGATGATGCCAAGGCTCACAGCAGACGGATCCGCGAGG |
| | | ATGGAAAGGCCGTGTCCAATGACGCCATGCTGGACGAGATGCGGGATCGC |
| | | GAAGCCTTCGTGGACCAGAAGAACAAGAGCCGGAAGGACCGGCAGAAGGA |
| | | CGAGCAGGCTGATCTGAGGCCTACCACACCTCCTATCATCGGCCCTGATA |
| | | GCAGCGACGAGCCTTCCGTGGATGTCCAGCCTGATGAGAGCCCCGAGGAA |
| | | CTGGATATCCCCGAGTTCGACATCTGGGACTTCGACGACGACGATGCCTG |
| | | A |
| | | (SEQ ID NO: 193) |
| | TnsC | ATGATCGCCCTGCAGGACCAAGAAGTGCAGGCCCACATTGAGCGGCTGCG |
| | | GAGAGATAAGACAGTGGCCCTGGATAGCGTGAAGCAGGCCCATACCTGGC |
| | | TGAAGCGGAAGAGAAACGCCAGACAGTGCGGCAGACTGACCGGCGATTCT |
| | | AGAACCGGCAAGACCAAGACCTGCGAGAGCTTCCTGAAGCTGTACGGCGA |
| | | GCCTGATCTGAGCGGCAGAGTGCCTATCATCCCCATCAGCTACGTGCACC |
| | | CCAAGCAAGAGTGCACCAGCAGAGAGCTGTTCAGAGAGATCCTGGAACAG |
| | | TACGGCGACGACCTGCCTAGAGGCACAGTGGGAGATGCCAGATCTCGGAC |
| | | CCTGAAGGTGCTGAGAGCCTGCAAGACCGAGATGCTGATGATCGACGAGG |
| | | CCGACAGACTGAAGCCCAAGACCTTTGCCGACGTGCGGGACATCTTCGAC |
| | | AAGCTGGAAATCAGCGTGATCCTGATCGGCACCAAGCAGCGGCTGGATCC |
| | | CGCCGTGAAGAAAGACGAACAGGTGTTCAACCGGTTCAGAAGCAGCTACC |
| | | GGATCGGCACAATCCCCAGCAACCAGCTGAAAACCATCGTCGGCCTGTGG |
| | | GAGAGAGACATTCTGAAGCTGCCCGTGCCTAGCAACCTGACCTCTGAGGC |
| | | CATGCTGAAAGAGCTGAGAAAGGCCACCGGCGTGTCCCGGAAGGGCTATT |
| | | ATATCGGCCTGATCGACATGGTGCTGCGCGAGGCTGCTATCAGAGCCCTG |
| | | GAAAAGGGCCAGAGCAAGATCGAGCTGGAAACCCTGAAAGAGGTGGCCAA |
| | | AGAGTACAGCTGA |
| | | (SEQ ID NO: 194) |
| | TniQ | ATGGTCATCCCTCAGATCCCTGCCTGGGTGTTCCCCGTGGAACCTTCTCC |
| | | TGGCGAATCCCTGTCTCACTTCCTGGGCAGATTCTGCAGAGAGAACCACA |
| | | CCACACTGAACCAGCTGGGCGAGAAAACAGGACTGGGAGCCGTGCTCGGA |
| | | AGATGGGAGAAGTTCCGGTTCATCCCACAGCCTAGCGACGCTCAACTGGC |
| | | CGCTCTGGCCAAACTCGTCAGACTGGAAGTGGACCAGATCAAGCAGATGC |
| | | TGCCCCAAGAGACAATGCAGAACAGAGTGATCAGACTGTGCGCCGCCTGC |
| | | TACGCCGAGGAACCTTATCACAGAATCGAGTGGCAGTACAAGCTGGCCAA |
| | | CAGATGCGACCGGCACCATCTGTTGCTGCTGCTGGAATGCCCCAACTGCA |
| | | AGGCCAAGCTGCCCATGCCTAGCAAGTGGGCCAATGGCACATGCAAGCGG |
| | | TGTCTGACCCCTTTCGAGCAGATGGCCGATCTCCAGAAGGGCATCTGA |
| | | (SEQ ID NO: 195) |
| | LE | TATTGGGAAAATTGGTTCACCGAGATTTAGGCCAAATGGAGGTTGAAAAC |
| | | CACCATTACATAGATAAGTGGCCAATTTAATTCGCGAACGTACATGTCGC |
| | | ATAACACGTAATCCGTCGCCATAACACGCTCTTGTCGCCGACCATTAAAT |
| | | GGCTAGACCCCTTTGAATTCAGGAACCTTGGCGATTTCATCCTCACTCTA |
| | | AAGAGCGCTCTTGAATAACAAAATATTTGACGCCTCTTGAAGAATGAACA |
| | | CAATCAGTGTCGTCTCTTTGAAGCTGAAATCGCCTCAGTATTAACGCACT |
| | | CTTTGTCGCCTCTTTGCGGCTTTGTCGGATCTGATCTAACAAATTAGATG |
| | | ACATATCTTGGCGACTATAGTACATTTGATTTAATTCACTTGTACTAGGT |
| | | GACTCCATGGAACTTGTTAATCCAGATGATCTGAATTCAGTAGAATCCAG |
| | | GCTCAAGCTAGAAATTATCGAGAAACTTTCAGAGCCCTGCGATCGCAAAA |
| | | (SEQ ID NO: 196) |
| | RE | GGTCGCCAAAAGCATTTCAGGGCAGGGCAGATTGAAATCGCTAGGGCCTG |
| | | CCTGATTACGACCAACTTGTTTCATCAGAGCGATACAGATGAAATCTTAG |
| | | AATATTTGTACTTGATTCAATATCGGCGTTAACATATCAAGCAGGTGGAT |
| | | TGAAAGGCGCACTTCGTTCGGGAAAGGGCAGCTTAGTCTTGATAAGTGCT |
| | | TTTTTAGATGCAAACTCGATCGACGACAATATTGTGTGATCAGTCGCATC |
| | | TAGCAACTAAACGACACGAATGTGTGATGGACGACAGCGAAATAGTTACG |
| | | ATGACACGAATGTGTTATCGATGACAAATAATATGTTACTCGACAACTTT |
| | | GAAAGAATCGGGATGAGAGGATTCGAACCTCCGGCCCCTTCGTCCCGAAC |
| | | GAAGTGCGCTACCAAGCTGCGCTACATCCCGTAGTTATCAGATACTAAAT |
| | | TAGCATAGAGGCGCGATCGCTGTTCATTGCCTTTGAAAATTGAAAACCGT |
| | | T |
| | | (SEQ ID NO: 197) |
| KK073769.1/ | TnsB | ATGGCCGACGAGGAATTCGAGTTCACCGAGGAACTGACCCAGGTGCCAGA |
| Scytonema | | TGCCATCCTGCTGGACAAGAGCAACTTCGTGGTGGACCCCAGCCAGATCA |
| hofmanni | | TCCTGGAAACCAGCGACAGACAGAAGCTGACCTTCAACCTGATCCAGTGG |
| UTEX 2349 | | CTGGCCGAGTCTCCCAACAGAACCATCAAGAGCCAGCGGAAGCAGGCCAT |
| /T68 | | TGCCGATACACTGGGCGTGTCCACCAGACAGGTGGAAAGACTGCTGAAGC |
| | | AGTACGACGAGGACCGGCTGACAGAGACAGCCGGAATTGAGAGAGCCGAC |
| | | AAGGGCAAGTACCGGGTGTCCGAGTACTGGCAGGACTTCATCAAGACCAT |
| | | CTACCAGAAGTCCCTGAAGGACAAGCACCCTATCAGCCCTGCCTCTGTCG |
| | | TGCGGGAAGTGAAGAGACACGCCATCGTGGACCTGAAGCTGAAGCCTGGC |
| | | GACTTCCCTCACCAAGCCACCGTGTACAGAATCCTGACACCTCTGATCGA |
| | | GCAGCACAAGAGAAAGACCAGAGTGCGGAATCCTGGCAGCGGCAGCTGGA |
| | | TGACAGTGGTCACAAGAGATGGCCAGCTGCTGAAGGCCGACTTCAGCAAC |
| | | CAGATCATTCAGTGCGACCACACCAAGCTGGACATCCGGATCGTGGACAT |
| | | CCACGGCAGCCTGCTGTCTGATTGTCCTTGGCTGACCACCATTGTGGACA |
| | | CCTACAGCAGCTGCGTCGTGGGCTTCAGACTGTGGATCAAGCAGCCTGGC |
| | | AGCACCGAAGTTGCCCTGGCTCTGAGACATGCCATTCTGCCCAAGAACTA |
| | | CCCCGACGACTACAAGCTGAACAAAGTGTGGGAGATCAGCGGCCCTCCAT |
| | | TCCAGTACTTTTTCACCGACGGCGGCAAGGACTTCAGAAGCAAGCACCTG |
| | | AAGGCCATCGGCAAGAAACTGGGCTTCCAGTGCGAGCTGAGAGACAGACC |
| | | TCCTGAAGGCGGCATCGTGGAACGGATCTTTAAGACCATCAACACCCAGG |
| | | TCCTGAAGGATCTGCCTGGCTACACAGGCGCCAACGTGCAAGAAAGACCC |
| | | GAGAACGCCGAGAAAGAGGCCTGCCTGACAATCCAGGATCTGGATAGGAT |
| | | CCTGGCCAGCTTCTTCTGCGACATCTACAACCACGAGCCGTATCCTAAAG |
| | | AGCCCCGGGACACCAGATTCGAGCGGTGGTTTAAAGGCATGGGCGGCAAG |
| | | CTGCCTGAGGCTCTGGATGAGAGAGAGCTGGATATCTGCCTGATGAAGGA |
| | | AGCTCAGAGAGTCATTCAGGCCCACGGCTCCATCCAGTTCGAGAACCTGA |
| | | TCTACAGAGGCGAGTCTCTGAAGGCCTACCGGGGCGAGTATGTGACCCTG |
| | | AGATACGACCCCGACCACATTCTGACCCTGTACGTGTACAGCTGCGAAAC |
| | | CGACGACAACGTGGAAAACTTCCTGGACTACGCCCACGCCGTGAACATGG |
| | | ACACACACGATCTGAGCGTGGAAGAACTGAAGGCCCTGAACAAGGATCGG |
| | | AGCAAGGCCCGGAAAGAGCACTTCAACTACGACGCCCTGCTGGCCCTGGG |
| | | CAAGAGAAAAGAACTGGTGGAAGAGAGGAAAGAGGACAAGAAAGAGAAGC |
| | | GGCGGAGCGAGCAGAAGAGACTGAGAGGCGCCAGCAAGAAAAGCAGCAAC |
| | | GTGATCGAGCTGCGGAAGTCCAGAGCCAGCACCAGCCTGAAGAAGGACGA |
| | | CCACCAAGAGGTGCTGCCCGAGAAAGTGTGCACCGAAGAGATCAAGATCG |
| | | AGAAGATTGAGCCCCAGCCTCAAGAGAACATCAGCGCCCAGATCGACACC |
| | | CAAGAGGAACACAGGCACAAGCTGGTGGTGTCCAACCGGCAGAAGAACCT |
| | | GAAGAAAATCTGGTGA |
| | | (SEQ ID NO: 198) |
| | TnsC | ATGGCCAGATCTCAGCTGGCCACACAGAGCTTCGTGGAAGTGCTGGCTCC |
| | | TCAGCTGGATCTGAAGGCCCAGATCGCCAAGACCATCGACATCGAGGAAC |
| | | TGTTCCGGACCTGCTTCATCACCACCGACAGAGCCAGCGAGTGCTTCAAG |
| | | TGGCTGGACGAGCTGCGGATCATGAAGCAGTGCGGCAGAGTGATCGGCCC |
| | | CAGAGATGTGGGCAAAAGCAGAGCTGCCCTGCACTACCGCGACGAGGACA |
| | | AGAAAAGGGTGTCCTACGTGAAGGCTTGGAGCGCCAGCAGCTTCAAGAGA |
| | | CTGTTCAGCCAGATCCTGAAGGACATCAACCACGCCGCTCCTACCGGCAA |
| | | GAGACAGGATCTGAGGCCTAGACTCGGCGGCAGCCTGGAACTGTTTGGAC |
| | | TGGAACTGGTCATCATCGACAACGCCGAGAACCTGCAGAAAGAGGCCCTG |
| | | ATCGACCTGAAGCAGCTGTTCGAGGAATGCCACGTGCCAATCGTGCTCGT |
| | | CGGCGGAAAAGAGCTGGACGATATCCTGCAGGGCTGCGACCTGCTGACCA |
| | | ACTTTCCCACACTGTACGAGTTCGAGCGGCTGGAACAAGAGGACTTCAGA |
| | | AAGACCCTGAGCACCATCGAGTTCGACATCCTGAGCCTGCCTGAGGCCTC |
| | | TAATCTCGGCGAGGGCAACATCTTCGAGATCCTGGCCGTGTCCACCAACG |
| | | CCAGAATGGGCGTGCTGGTCAAGATCCTGACAAAGGCCGTGCTGCACAGC |
| | | CTGAAGAACGGCTTCAGCAGAGTGGACGAGAGCATCCTGGAAAAGATCGC |
| | | CAGCAGATACGGCCGGAAATACGTGCCCCTGGAAAGCCGGAACCGGAACG |
| | | AATGA |
| | | (SEQ ID NO: 199) |
| | TniQ | ATGCTGGTGGTCATGGCCGAGAACACATTCCCCAGCAAGGTGGAAATCGG |
| | | CATGAACGAGGACGACGAGATCCTGCCTAAGCTGGGCTACGTGGAACCTT |
| | | ACGAGGGCGAGAGCATCAGCCACTACCTGGGCAGACTGCGGAGATTCAAG |
| | | GCCAACAGCCTGCCTAGCGGCTACAGCCTGGGAAAGATTGCTGGACTGGG |
| | | CGCCGTGATCAGCAGATGGGAGAAGCTGTACTTCAACCCGTTTCCTACAC |
| | | AGCAAGAGCTGGAAGCCCTGGCCTCTGTTGTGGGAGTGAACGCCGATAGA |
| | | CTGAGCCAGATGCTGCCTCCTAAGGGCGTGACCATGAAGCCCAGACCTAT |
| | | CAGACTGTGCGGCGCCTGCTACCAAGAGAGCCCCTTTCACAGAATCGAGT |
| | | GGCAGTTCAAGGACGTGATGGTCTGCGACCGGCACCAGCTGAGACTGCTG |
| | | ACCAAGTGCACCAACTGCGAGACACCCTTTCCTATACCTGGCGACTGGGT |
| | | GCTGGGAGAGTGCCCTCACTGCTTTCTGCCTTTTGCCACCATGGCCAAGA |
| | | AGCAGAAGAAGGGCTGA |
| | | (SEQ ID NO: 200) |
| | LE | TTTAATGAAAGTCACGAAAATACGTAACTTATGTCCCACGAATTCGGAAA |
| | | ATTGGACATTAATTCTTTAAAACTGACAATAATTATTTAAATTATGTACA |
| | | TTCGCAAATTATATGTCGCGATTCGCAAATTAGTGTCGCAACTGCTTTAA |
| | | AGCCTGGAAGCTATATTGTGTAAGTATCATAAGCTATTTACCCCAGAAAA |
| | | GACCAATAAACTTAATTCGCATATTGTATGTCGCAAAGTCCAATTTCGCA |
| | | TATTATATGTCGTTTGTTAAGAATTAGGTCTTTCGCAAATTAGATGTCGG |
| | | ATTTTGTCATAATTAATGGTACATTAGTACGTTAATTATTCATGAGTGGG |
| | | TTTCACTCTAATGGCAGACGAAGAATTTGAATTCACTGAAGAATTGACAC |
| | | AAGTTCCAGACGCTATTTTGCTTGACAAGAGTAATTTTGTGGTAGACCCA |
| | | TCGCAAATTATTCTAGAAACTTCGGATAGGCAAAAACTGACATTTAATCT |
| | | (SEQ ID NO: 201) |
| | RE | GCTAGGAGTGTATTAATAATAGAAGATTCAAATCTTTCAAATTTTTCTGA |
| | | GAGGGTTGAAAGGAGCGCTACAATGGCATCATTGATTTCAGAACTTTAGA |
| | | ATAATTGAACACTACGAGCTTAAATAATAATGCTTTCTTTTCGACGACAT |
| | | TATTTTGTTAACGTTTACTATGTTTGTTTAGACGACACTAATTTGTTAAT |
| | | AACGACATTAATCTGTTATTCGACATCTAGCTATTAGGGCGACAAATAAT |
| | | TTGTCGCTCTATGACTTGAGATCAAGACAGTCTGCGACATTAATTTGCGA |
| | | AAAGTTAGTGTAATTAAATTACCTACATAAAAACCACCAAAGCGACATTA |
| | | ATGTGCCAATCGCGACACTAATTTGCGAATTGCGACATATAATTTGCGAA |
| | | TTTACAACAATGGAGGTAAGCGGGTTCGAACCGCTGACCTCTGCAATGCC |
| | | ATTGCAGCGCTCTACCAACTGAGCTATACCCCCTTGTCATGCGTTTCTGA |
| | | (SEQ ID NO: 202) |
| KV757663.1/ | TnsB | ATGAGCACCAGAAGCCTGTCTCAGGGCGCCAATCTGCCTGGACACGAAGA |
| Nostoc | | AGTGCTGGCCACAGAGCAAGGCGGCGAACAGGTGGAAGGCAAGAGCTACC |
| sp. KVJ20/ | | TGCTGTTCAACGACGACAGCCCCGAGTTCCAGCAGAAAGTGGACGTGATC |
| T69 | | GACGCCATCGTGCAGGCCCCTGACAAGAACGCCAGAAGAGAGGCCATTGC |
| | | CGAGGCCGCTAAAGCCCTGGGCAAGTCCACCAGAACCATCAAGCGGATGA |
| | | TCGAGCGGGTGCAGAAAGACGGCGTTGCCACACTTGCTGTGGGCAGACAG |
| | | GATAAGGGCCAGTTCAGAATCAGCGAGCAGTGGTTCAAGTTCATCGTGGA |
| | | CACCCACAAATGGGGCCAGACCAAGGGCAGCAGAATCAACCACAACCAGA |
| | | TCCACGTGCAGCTGATCTCCCTGGCCAGCAAGGGCGAAGATCTGCGGAGC |
| | | AAGAAATACGTCGAGAAGTTCAAGCAGTACCCCGAGGTGCTGGAAGATCT |
| | | GATCGAGGGCAAGTTCCCCAGCCACGTGACCGTGTACAAAGTGATCAACT |
| | | TCTACATCGAGCAAGAGAACCGGATCGTGCGGCACCCTGGATCTCCAAGA |
| | | GAGGGCCAGATCATCCAGACCACCGAGGGCATCCTGGAAATCAGCCACAG |
| | | CAATCAGATCTGGCAGGTCGACCACACCAAGCTGGACATCCTGCTGATCG |
| | | ACGATGAGGACAAAGAGATCATCGGCAGACCCTACATCACCCTGGTCATG |
| | | GACAGCTACAGCGGCTGCGTCGTGGGCTTTTACCTGGGCTATGAGTCTGC |
| | | CGGCTCTCACGAAGTGGCCCTGGCCTTCAGACACAGCATCCTGCCTAAGC |
| | | ACTACGAGCCCGAGTACGAGCTGCAAGAGAAGTGGGACATCTTCGGCGTG |
| | | CCAGAGTACCTGGTCACCGACAGAGCCAAAGAGTTCAAGAGCGCCCACCT |
| | | GAAGCAGATCAGCCTGCAGCTGGGCTTCCAGCGGAGACTGAGAGCCTTTC |
| | | CTTCTGCCGGCGGACTGATCGAAACCATCTTCGACAAGATCAACAAAGAG |
| | | GTGCTGAGCTTCTTCGGCGGCTACACAGGCAGCTCTGTGGAAGAAAGACC |
| | | CAAGAATGCCGAGAAAACCGCCTGTCTGACCCTGGACCAGCTGGAAAAGA |
| | | TCCTCGTGCGGTACTTCGTGGACCACTACAACCAGCACGACTACCCCAAA |
| | | GTGAAGCAGCTGAAGCGGATCGAGAGATGGAAGTCCATGCTGCTGGTGGA |
| | | ACCCGAGGTGTTCGACGAGAGAGAGCTGGATATCTGCCTGATGAAGGCCA |
| | | CCTACCGGAACGTTGAGAAGTACGGCAGCGTGAACTTTGGCGGCCTGGTG |
| | | TACCAGGGCGATAGCCTCGTTGGATACGAGGGACAGAAGATCTCTCTGAG |
| | | ATACGACCAGCGGAACATCCTGACACTGCTGGCCTACACCAGACCTAGCA |
| | | ATGCCCAGCCTGGCGAGTTTATCGGCGTGGTCAAAGCCCGCGACCTGGAA |
| | | AAAGAGAGACTGAGCCTGGGCGAGCTGAACTGGATCAAGAAGAAGCTGCG |
| | | CGAGAAGGCCAAAGAAGTGGACAACAGCTCCATCCTGAACGAGCGGCTGA |
| | | AGATCGTGGAAGAGGTCGAGGAAGGCAGAAAGAGCCGGCGGAAGAGACAG |
| | | AGGAAGGCCCAAGAAAAGCACGCCCACGAGAGCAACAAGAGCAAAGTGCT |
| | | GGAAATGTTCCCCGAGAACGCCACACTGGAAGAAACCGCCATCACACAAG |
| | | AGAACTTCCCCAGCGCTCCTACCACCAGCCAGAACGTGGTCAAGAGCATC |
| | | AACAAGCAGGATATCCCCGAGGCCAACCGGACCGCCAAAACAAGACGACC |
| | | TAGAGTGGGAGTGCAGGACTGGAACCAGTTCGTGAAGGACAACTGGTGA |
| | | (SEQ ID NO: 203) |
| | TnsC | ATGAGCGAGACAAATCTGGCCCACGTGCAGCCCAAGCTGCAGAAGCAGTT |
| | | TGACGCCTCTCTGCAGTCCGCCGAGGAACTGAGAAGGCTGCCAGAGATTC |
| | | AGGCCGAGGTGGAAAGAATCGGCAAGGCCGATACCTACCTGCCTCTGGAC |
| | | AGAGACACCGAGCTGTTCGACTGGCTGGACGATCAGAGGGATGCCAAGCT |
| | | GTGTGGCTACGTGACAAGCGCCACAGGCTCTGGACTGCTGAAAGCCTGCC |
| | | AGCTGTACCGGATGCAGTACGTGAAGAGAAGAGGCACCCTGCTGGAAATC |
| | | CCCGCCACAGTGATCTACGCCGAGATCGATCAACACGGCGGACCCACCGA |
| | | TCTGTACTACAGCATCCTGGAAGAAGTGGGACACCCTCTGACCAATGTGG |
| | | GCGCCCTGAGAGATCTGAGAGCCAGAGCTTGGGGAACCCTGAAGGCCTAC |
| | | GGCGTGAAGATCCTGATCGTGGGCAACGCCGACTACCTGACACTGGAAGG |
| | | CTTCAACGAGCTGGTGGACATCTTCACCAAGCGGCGGATCCCCATCATCC |
| | | TCGTGGGCACCTACTACCTGAGCGAGAATATCCTGGAACGGAAGTCCCTG |
| | | CCTTACGTGCGGGTGCACGACAGCTTTCTGGAACCCTACGAGTTCCCCAA |
| | | CCTGACCGAAGAGGACATCATCGAGGTGGTGGACGACTGGGAGCAGAAGT |
| | | TCCTGACACAGGACGGCCGGCTGAATCTGACCCAGATGGAAAGCGTGATC |
| | | AGCTACCTGAAGCTGAAGTCTGGCGGCCTGATCGAGCCCCTGTACGACCT |
| | | GCTGAGAAAGATCGCCATTCTGAAGCTGGACGAGCCCAGCTTCGAGCTGA |
| | | GCCAGGACAATCTGACCAGAAAGTTCGGCAGACGGAAAGAGCCCAAAGTC |
| | | AAGTTCCAGCGGAAGGGCTGA |
| | | (SEQ ID NO: 204) |
| | TniQ | ATGGAACCTGAGGCCGTGCAACACCCTCCTTGGTACGTGGAACCTAACGA |
| | | GGGCGAGAGCATCAGCCACTACTTCGGCAGATTCAGACGGCACGAGGCCG |
| | | TGTGTGTTAGCTCTCCTGGCACACTGTCTAAGGCCGCTGGAATCGGACCT |
| | | GTGCTGGCCAGATGGGAGAAGTTCCGGTTCAACCCATTTCCGATCCAGAA |
| | | AGAGCTGGAAGCCATTGCCAAGCTGATCGGCCTGGACGTGGACAGAATTG |
| | | CCCAGATGCTGCCTCCTAAGGGCGAGAAGATGAAGATGGAACCCATCAGA |
| | | CTGTGCGCCGCCTGTTATGCCGAGCAGCCTTACCACAGACTGGAATGGCA |
| | | GTTCCAGAGCACCGTGGGCTGCGAGAGACACAAGCTGAGACTGCTGAGCG |
| | | AGTGCCCCTTCTGCAAAGAGAGATTCGCTATCCCCGCTCTGTGGGAGAAG |
| | | GGCGAGTGCAAGAAATGTCACGCCCTGTTCCGGTCCATGGCCAAGAGACA |
| | | GAAGGCCTACTGA |
| | | (SEQTDNO: 205) |
| | LE | TACCTTCTGGACATTGCCCACATCTGTCTCGTCCTGACCTTCTTGCCTCA |
| | | ATATTAACTAGTAATTAATTTTTTGATCCATATTTTAGGAAATTAACCGA |
| | | AGCGTATTGAGTGTGAACAAGGGAATATCTTTGAAATTTTAATTCGGCAT |
| | | AGACGAACGATATTATCTAATTAATAACGACATGAATTTGCAAATTGCGA |
| | | CATTGAATTTGCGAATGTACACATGGTGTCCATTAAATAATTATTGTCAC |
| | | TTTTAAAGAATTATTGTCCAGTTTTACGATATCTGTATAACAGGCTCAAA |
| | | GGCTTACCAAACAAGTCTTTGAGCTATATTTATACTTTTATTATTCTCTA |
| | | GCCAGTTTTAAAGTAAATGATGTCATTTTTCTGATAAATTTTTAAAGTAA |
| | | ATGATGTCATTTTTCTTGGAAGACGGGTCAAGTGTATGTCTACGCGTTCT |
| | | TTGAGTCAAGGCGCTAATCTCCCCGGTCATGAGGAAGTTCTTGCAACGGA |
| JXCB01000 | | (SEQ ID NO: 206) |
| 008.1/ | RE | GCATATAGGGTGATAAATCCAAACCAATAACTTCCGCTTGCCAGAAAGCC |
| Tolypothrix | | TGTTTTAACATTAAAGTTGTGGAACCTGTGCCGCAACCTAAATCAAGTAT |
| campylonemoides | | GCGTCGTGGTTTCACCTTGACGGCATCAACTAAAGCTTGACGGACAATAC |
| VB511288/ | | TTTCATTCGGTGGCAGAACATATTGGGTAATCGGATCGTAAGTAACTGCT |
| T70 | | GCACTGGAATTGAGATATCCGCCTGTAACACCATGAAAATTTTGACTACT |
| | | GTAGTACGCCGGAATTATCACATCATCTCGTTGGAAGCGATCGCTCTCTT |
| | | TCTCCCAGTCAATACTATCAGCGTAACGCCGTAACCCGTCTTCATCAATC |
| | | AAAAGACGCACTACAGGGGATAAAAAACGTTCCCAGATTGTATCTTGACG |
| | | CACTACCATATTGTGTCAGAACTTTAAAAGTTTACTTAAGTAAAGTAATT |
| | | TTCTTTACAAATTTTAATACATTTATGAGACATCTGCTTTCTGTCTGTGG |
| | | TATTGGCTTGACGCTTGTAATTATTTTAGTTACACTTGTAATACAAAGAA |
| | | GCTACTCTCTAAAAGTAGTTCTTCAGCTTCACGAAAATTGAGCGAACAAA |
| | | ATGAAAGACAATATAACATTTAAATTGCTACAACTAACTAGTAGTATGTC |
| | | AATTTGAAATCAATGCCTTACAACAAACCTACAGAACTTATTTCAAAAAC |
| | | CAAATACTAGTCATATCGATAATAAGTTATAAGTCATATCGATACTTATC |
| | | AGTGACATCCTCACCTACCTAAAGGCGCGGTGATTCTGGAGTAATGAGTA |
| | | ATAAGTAATGAGTAAATACCCATTTTTCATCCACTCATTACTCATTACTC |
| | | CTTACTCATTACTCATTACTTTAAAGCATTGTGTGAAGCACAGGGCTTCA |
| | | GATCCAAATATGTGGTGACATCGACCCAATCGAAAATCTAAAATTCAAAA |
| | | TCCAAAATAGAAACAATTATGCCATACGAAAAGTTAGAAATTACCACACC |
| | | (SEQ ID NO: 207) |
| | TnsB | ATGCAGGATACCCACAGCAGCAAGACCCCTGCCAACAGCAATAGCACCCT |
| | | GACCGAGACAAACGTGATCGTGTCCGAGCTGAGCGACGAGGCCAAGCTGA |
| | | AGATGGAAGTGATCCAGAGCCTGCTGGAAGCCGGCGACAGAACAACATAC |
| | | GCCCAGAGACTGAAAGAGGCCGCCGAGAAGCTGGGAAAGTCTGTGCGGAC |
| | | AGTGCGGCGGCTGATCGACAAGTGGGAGAAAGAGGGACTGATCGGCCTGA |
| | | CACAGACCGAGAGAAATGACAAGGGCAAGCACAGAGTGGACGAGAACTGG |
| | | CAAGAGTTCATCCTCAAGACCTACAAAGAGGGCAACAAGGGCAGCAAGCG |
| | | GATGACCAGACAGCAGGTCGCCGTCAGAGTGAAGGCCAGAGCTGATGAGC |
| | | TGGGCGTGAAGCCTCCTAGCCACATGACCGTGTACAGAGTGCTGAAGCCC |
| | | CTGATTGACAAAGAGGAAAAGGCCAAGAGCATCAGAAGCCCCGGCTGGCG |
| | | AGGAAGCAGACTGAGCGTCAAGACCAGAGATGGCAAGGATCTGCAGGTCG |
| | | AGTACAGCAATCAAGTGTGGCAGTGCGACCACACCAGAGTGGATGTGCTG |
| | | CTGGTGGATCAGCACGGCGAGATTCTTGGCAGACCTTGGCTGACCACCGT |
| | | GATCGACAGCTACAGCAGATGCATCATCGGCATCAACCTGGGCTACGACG |
| | | CCCCTAGCTCTCAGATTGTGGCTCTGGCCCTGAGACACGCCATCCTGCCT |
| | | AAGAGCTACGGCAGCGAGTATGGCCTGCACGAGGAATGGGGCACATACGG |
| | | ACTGCCCGAGCACTTCTATACCGACGGCGGCAAGGACTTCAGAAGCAACC |
| | | ATCTGCAGCAGATCGGCGTGCACCTGGGCTTCGTGTGTCACCTGAGAGTG |
| | | TCTAAGGCCCCTCCATTCGCTCAGAGACTGCGGAGAAGGCAAGAGGCCAG |
| | | ACCTTCTGAAGGCGGCATCGTGGAAAGACCCTTCAAGACCTTCAACACCG |
| | | AGCTGTTCAGCACCCTGCCTGGCTACACAGGCAGCAACGTGCAAGAGAGG |
| | | CCTCAAGAGGCCGAGAAAGAAGCCTGTCTGACCCTGAGGCAGCTGGAACA |
| | | GCAGCTCGTGCGGTACATCGTGAACCACTACAACCAGCGGCTGGACGCCA |
| | | GAATGGGCGATCAGACCAGATTTCAGAGATGGGAGAGCGGCCTGATCGCC |
| | | ACACTGGATCTGCTCAGCGAGAGAGATCTGGACATCTGCTTTATGAAGCA |
| | | AACCCGCAGACAGATCCAGAGAGGCGGCTACCTGCAGTTCGAGAACCTGA |
| | | TGTACCGGGGCGAGTACCTGGCTGGATATGCCGGCGAATCTGTGGTGCTG |
| | | AGATACGACCCCAGAGACATCACCACCATCCTGGTGTACCGGAAAGAAGG |
| | | CGACAAAGAAGTCTTTCTGGCCAGGGCCTACGCTCAGGACCTGGAAACAG |
| | | AGCAGCTGAGCATCGATGAGGCCAAGGCCAGCTCTAGACAAGTGCGGAAG |
| | | GCCGGCAAGACCGTGTCCAACAGATCTATCCTGGCCGAGATCAGAGAGCG |
| | | GGAAACCTTTAGCACCCAGAAAAAGACCAAGAAAGAGCGGCAGAAGATCG |
| | | AGCAGGCCGAGGTGCAGAAAGCCAAGCAGCCCATCAGAGTGGAACCCGAG |
| | | GAACAGGTGGAAGTGGCCAGCATTGATGCCCAGACCGAGCCTGAGATGCC |
| | | CGAGGTGTTCGACTACGAGCAGATGAGAGAAGATTACGGCTGGTGA |
| | | (SEQ ID NO: 208) |
| | TnsC | ATGACCACACAAGAGGCCCAGGCTGTTGCTCAGCAGCTGGGAGAGATCCC |
| | | CGTGAACGATGAGAAGCTGCAGAAAGAGATCCAGCGGCTGAACCGGAAGG |
| | | GCTTCGTTCCTCTGGAACAGGTGCAGATCCTGCACGACTGGCTGGAAGGC |
| | | AAGAGACAGAGCAGACAGTCCGGCAGAGTTGTGGGCGAGAGCAGAACCGG |
| | | CAAGACCATGGGCTGTGACGCCTACCGGCTGAGAAACAAGCCTAAGCAAG |
| | | AGGCCGGCAAGCCTCCTACAGTGCCCGTGGCCTATATCCAGATTCCTCAA |
| | | GAGTGCGGCGCCAAAGAACTGTTCAGCGTGATCCTGGAACACCTGAAGTA |
| | | CCAAGTGATCAAGGGCACCGTGGCCGAGATCAGAGACAGAACCCTGAGAG |
| | | TGCTGAAAGGCTGCGGCGTGGAAATGCTGATCATCGACGAGGCCGACCGG |
| | | TTCAAGCCCAAGACCTTTGCTGAAGTGCGGGACATCTTCGACAAGCTGGA |
| | | AATCTCCGTGATCCTCGTGGGCACCGACAGACTGGATGCCGTGATCAAGA |
| | | GGGACGAACAGGTGTACAACCGGTTCCGGGGCTGCCACAGATTTGGCAAA |
| | | CTGAGCGGCGAGGACTTCAAGCGGACCGTGGAAATCTGGGAGAAGAAGGT |
| | | GCTGCAGCTGAGCGTGGCCAGCAACCTGAGCAGCAAGACAATGCTGAAAA |
| | | CCCTGGGCGAAGCCACCAGCGGCTATATCGGACTGCTGGACATGATCCTG |
| | | AGAGAGAGCGCCATCAGAGCCCTGAAGAAAGGCCTGCAGAAGGTGGACCT |
| | | GGAAACCCTGAAAGAAGTGGCCGCCGAGTACAAGTGA |
| | | (SEQ ID NO: 209) |
| | TniQ | ATGGAAGTGACCGAGATCCAGAGCTGGCTGTTCAGAGTGGAACCCCTGGA |
| | | AGGCGAGAGCCTGTCTCACTTCCTGGGCAGATTCAGACGGGCCAACGATC |
| | | TGACACCAACCGGCCTGGGAAAAGCCGCTGGACTTGGCGGAGCTATTGCT |
| | | TATGGCGGAGCCCTGCCTATCGCCAGATGGGAGAAGTTCCGGTTCAACCC |
| | | TCCACCTAGCCGGCAGCAACTGGAAGCCCTGGCTACAGTCGTGGGAGTCG |
| | | ATGCCGATAGACTGGAACAGATGCTGCCTCCTACCGAAGTGGGCATGAAG |
| | | ATCGAGCCCATCAGACTGTGCGGCGCCTGTTATGCCCAGTCTCCTTGCCA |
| | | CAAGATCGAGTGGCAGTTCAAAGTGACCCAAGAGTGCGCCAGCCACAAGC |
| | | TGAGACTGCTGAGCGAGTGCCCTAATTGCGGCGCCAGATTCAAAGTGCCC |
| | | GCTCTGTGGGTTGACGGCTGGTGCCAGAGAAGCTTCCTGACCTTCGTGGA |
| | | AATGACCCGCTACCAGAAAAGCGTGTGA |
| | | (SEQ ID NO: 210) |
| | LE | GAATTAGAGTAAATCGTCAAGACTACTTAAGCAAGTTCACAACCTAATTA |
| | | ACCAAAAACTATACGTAGGATATCCATCTGATACCTAAAAACTACAATTT |
| | | TGAAGTATCATATGCCCTCAAAAGTTTAATTTTTAGTGTACATTCACTAA |
| | | TTATTTGTCAATTTAACAAAATATTGTCAAAATACGTGTAAATGACTGAA |
| | | ACCCTGCTGTAACAAAGCTTATGGCAGGTTTTTAATTATTAAACTTCTCA |
| | | CAACCACCGTTAAACGCGATTCACAAATTAGATGTCTAATCCCTGAAATT |
| | | TAACAATTTAAGTGTCACTTTCCAGAAACAAGGAAAATTACTAAGTTTTA |
| | | GAAAACTTAACAGATTAAATGTCACTCTGGATAGGTAGAATAGACATATA |
| | | TGTTGCAATTAAACAAATGTGTATATGCAGGACACTCATTCTTCTAAAAC |
| | | ACCTGCAAACTCAAATAGCACTCTCACCGAAACAAATGTCATTGTGTCGG |
| | | (SEQ ID NO: 211) |
| | RE | GTTACAACAACCCTCCCGGATAGGGGGGGGTTAAAAGAGCATTACTATGT |
| | | TCCGCAAGCTAGGCTCAAAATTCCAATATATTCTTTAAATATAGGTGGGT |
| | | TGAAAGAGGTCACGAGTTCAATCTTCTTCGTTGAAAGTAGAATTATAAAA |
| | | TGAACTCAGCAATGTTGACATTTAATTCGTTAAAACTAGAAAACTAGTAA |
| | | TTATTTGTCGATAACTGTGCAAGCCAGGTGAAGTGACAATTATTCTGTTA |
| | | ACAGTGACATTAACTGTTTAAAAGTGACATCAATCTGTTAACAGTGACAA |
| | | ATAATTAGTTAGGGCTTGCTGAAAAAGAAAGAAAAGGCAGCATTCTATGA |
| | | TTTTTAGAGCAGAGATATGTATTCAAGTGCAAGAAAAAAGGCTATAATAC |
| | | TCTGAAACCCTTGCATCACCGTAAGCTCCTGGTATACTTAGTAGCTTAAG |
| | | TAACGATGTACCGAAAAAAGGAACCAACTCAAATTCCACCGGAAAGCTTT |
| | | (SEQ ID NO: 212) |
| KI928193.1/ | TnsB | ATGAGCGGCTTTCACAGCATGGCCGACGAGGAATTCGAGTTCACCGAGGA |
| Aphanizome | | CAGCACCCAGGTGCCAGAAGCCATCCTGCTGGACAAGAGCAACTTCGTGG |
| non flos- | | TGGACCCCAGCCAGATCATCCTGGCCACAAGCGACAGACACAAGCTGACC |
| aquae | | TTCAACCTGATCCAGTGGCTGGCCGAGTCTCCCAACAGAACCATCAAGAG |
| NIES-81 | | CCAGCGGAAGCAGGCCGTGGCCAACACACTGGATGTGTCCACCAGACAGG |
| /T71 | | TGGAACGGCTGCTGAAGCAGTACGACGAGGACAAGCTGAGAGAGACAGCC |
| | | GGCATCGAGAGAGCCGACAAGGGCAAGTACAGAGTGAACGAGTACTGGCA |
| | | GAACTTCATCAAGACCATCTACGAGAAGTCCCTGAAGGACAAGCACCCTA |
| | | TCAGCCCCGCCAGCATCATCAGAGAAGTGAAGAGACACGCCATCGTGGAC |
| | | CTGGGCCTGAAGCTGGGAGATTATCCACACCAGGCCACCGTGTACCGGAT |
| | | CCTGGATCCTCTGATCGAGCAGCACAAGAGAAAGACCAGAGTGCGGAATC |
| | | CTGGCAGCGGCAGCTGGATGACAGTGGTCACAAGAAAGGGCGAGCTGCTC |
| | | AAGGCCGACTTCAGCAACCAGATCATTCAGTGCGACCACACCAAGCTGGA |
| | | CGTGCGGATCGTGGACAACCACGGCAATCTGCTGAGCGAGAGGCCTTGGC |
| | | TGACCACCATTGTGGACACCTTCTCCAGCTGCGTCGTGGGCTTCAGACTG |
| | | TGGATCAAGCAGCCTGGCTCTACCGAAGTGGCCCTGGCCTTCAGACATGC |
| | | CATTCTGCCCAAGAACTACCCCGAGGACTACCAGCTGAACAAGAGCTGGG |
| | | ATGTGTGCGGACACCCCTACCAGTACTTTTTCACCGACGGCGGCAAGGAC |
| | | TTCAACAGCAAGCACATCAAGGCCATCGGCAAGAAACTGGGCTTCCAGTG |
| | | CGAGCTGAGGGACAGACCTCCTGAAGGCGGCATCGTGGAACGGATCTTTA |
| | | AGACCATCAACACCCAGGTCCTGAAGGATCTGCCTGGCTACACAGGCGCC |
| | | AACGTGCAAGAAAGACCCGAGAACGCCGAGAAAGAGGCCTGCCTGACAAT |
| | | TCAGGATCTGGATAAGATCCTGGCCTCCTTCTTCTGCGACATCTACAACC |
| | | ACGAGCCGTATCCTAAAGAGCCCCGGGACACCAGATTCGAGCGGTGGTTT |
| | | AAAGGCATGGGCGGCAAGCTGCCTGAGCCTCTGGATGAGAGAGAGCTGGA |
| | | CATCTTCCTGATGAAGGAAGCTCAGAGAGTCGTCCAGGCTCACGGCTCCA |
| | | TCCAGTTCGAGAACCTGATCTACCGGGGCGAGTTCCTGAAGTCCCACAAG |
| | | GGCGAGTATGTGACCCTGAGATACGACCCCGACCACATCCTGAGCCTGTA |
| | | CATCTACAGCGGCGAGACAGACGACAATACCGAAGAGTTCCTGGGCTACG |
| | | CCCACGCCATCAACATGGACACACACGACCTGAGCATCGAGGAACTGAAG |
| | | GCCCTGAACAAAGAGCGGAGCAACGCCCGGAAAGAGCACTGCAATTACGA |
| | | CGCCCTGCTGGCCCTGGGCAAGAGAAAAGAACTGGTGGAAGAACGCAAAG |
| | | AGGACAAGAAGGCCAAGCGGAACAGCGAGCAGAAGAGACTGAGAAGCGCC |
| | | AGCAAAAAGGACAGCAACGTGATCGAGCTGCGGAAGATCAGAGCCAGCAA |
| | | GAGCAGCAAGAAACAAGAGAATCAAGAGGTGCTGCCCGAGCGGATCAGCC |
| | | GGGAAGAGATCAAGATCGAGAAGATTGAGCAGCAGCCCCAAGAAAACCTG |
| | | AGCACAAGCCCCAATCCTCAAGAGGAAGAACGGCACAAGCTGGTGTTCAG |
| | | CAACAGACGGAAGAACCTCAACAAGATCTGGTGA |
| | | (SEQ ID NO: 213) |
| | TnsC | ATGGCTCAGCCTCAGCTGGCCACACAGAGCATCGTGGAAGTGCTGGCCCC |
| | | TCGGCTGGATATCAAAGCCCAGATCGCCAAGACCATCGACATCGAGGAAA |
| | | TCTTCCGGGCCTGCTTCATCACCACCGACAGAGCCAGCGAGTGCTTCAGA |
| | | TGGCTGGACGAGCTGCGGATCCTGAAGCAGTGCGGCAGAATCATCGGCCC |
| | | CAGAAACGTGGGCAAGAGCAGAGCTGCCCTGCACTACAGAGATGAGGACA |
| | | AGAAACGGGTGTCCTACGTGAAGGCTTGGAGCGCCAGCAGCAGCAAGAGA |
| | | CTGTTCAGCCAGATTCTGAAGAACATCAACCACGCCGCTCCTACCGGCAA |
| | | GACCCAGGATCTTAGACCTAGACTGGCCGGCAGCCTGGAACTGTTCGGAC |
| | | TGGAACTGGTCATCATCGACAACGCCGAGAACCTGCAGAAAGAGGCCCTG |
| | | CTGGACCTCAAGCAGCTGTTCGAGGAATGCAACGTGCCCATCGTTCTGGC |
| | | TGGCGGCAAAGAGCTGGACGAACTTCTGCAGGACTGCGACCTGCTGACCA |
| | | ACTTTCCCACACTGTACGAGTTCGAGCAGCTGGAATACGACGACTTCAAG |
| | | AAAACCCTGACCACCATCGAGCTGGACATCCTGTCTCTGCCCGAGGCCTC |
| | | TAATCTGGCCGAGGGCAACATCTTCGAGATCCTGGCCTTCAGCACCAACG |
| | | CCAGAATGGGCATCCTGATCAAGATCCTGACCAAGGCCGTGCTGCACAGC |
| | | CTGAAGAACGGCTTCCACAGAGTGGACGAGTCCATCCTGGAAAAGATCGC |
| | | CAGCAGATACGGGACCAAGTACATCCCTCTGGAAAACCGGAACCGGGACT |
| | | GA |
| | | (SEQ ID NO: 214) |
| | TniQ | ATGCTGGTGGTTATGGCCCAGAACATCTTCCTGAGCAAGACCGAGATCGG |
| | | CATCGACGAGGACGACGAGATCAGACCCAAGCTGGGCTACGTGGAACCTT |
| | | ACGAGGGCGAGAGCATCAGCCACTACCTGGGCAGACTGCGGAGATTCAAG |
| | | GCCAACAGCCTGCCTAGCGGCTACAGCCTGGGAAAGATTGCTGGACTGGG |
| | | CGCCATGATCAGCAGATGGGAGAAGCTGTACTTCAACCCGTTTCCTACAC |
| | | CTCAAGAGCTGGAAGCCCTGTCTAGCGCCGTGGGAGTGAATGTGGACCGG |
| | | CTGATGGAAATGCTGCCCAGCCAGGGCATGACCATGAAGCCCAGACCTAT |
| | | CAGACTGTGCGCCGCCTGTTATGCCGAGTCTCCTTGCCACAGAGTGGAAT |
| | | GGCAGCTGAAGGACCGGATGAAGTGCGACCGGCACAACCTGCGGTTTCTG |
| | | ATCAAGTGCACCAACTGCGAGACACCCTTTCCTATACCTGCCGACTGGGT |
| | | CAAGGGCGAGTGCCCTCACTGCTTTCTGAGCTTCACCAAGATGGCCAAGC |
| | | GGCAGAAGCGGGACTAA |
| | | (SEQ ID NO: 215) |
| | LE | CAGCTTTTGCTTTACCCCTACTACACATCTGGGTTCTTTGTCATTTGGCA |
| | | AAAGTTTAAATCTCACCCGTGTTTAGTATACATGTACATTCGCAAATTAT |
| | | ATGTCGCATTTCGCAAGTCATGTCGCAACTGCTTTTAAGGGCTAGAACCT |
| | | TTATTATATAAGCATCATAAGTTATTTACCCCTACAAAAGACAAAATTAC |
| | | CTAATTCGCATATTGTATGTCGCAAAACCTAATTTCGCAAATTAAACGTC |
| | | GGTTGTTAAGATTTTGGTATTTTGCAAATTAGATGTCGCATTTTTGAGAG |
| | | ATTCATGGTACATTAGTACCTTAATCATTCATGAGTGGGTTTCACTCTAT |
| | | GGCAGACGAAGAATTTGAATTCACTGAAGACTCGACGCAAGTTCCAGAAG |
| | | CTATTTTGCTTGACAAGAGTAATTTTGTCGTAGATCCATCCCAAATTATT |
| | | CTGGCAACGTCGGATAGGCATAAACTGACATTTAATTTAATCCAGTGGCT |
| | | (SEQ ID NO: 216) |
| | RE | GTTTCAACTAGCATCCCGACTAGGGGTGGTTAAAAATATAGGTTATTGAC |
| | | TTGCGTTAACCATTAAAATGGTTGCAAAATAGAAATGATCATGGGAGGGT |
| | | TGAAAGGAGTGCTGCGATCGAACACATATTAATAATCAAATTAATGCCCT |
| | | TGCAGCAATAATTTATTGTATTGTGTAGTCAATGTTAAGTTCATGCGACA |
| | | TTAATTTGCGAAAACTTAGAATAATTAAATTGACTCAGAAAAACAACCAC |
| | | CGCGACATTAATTTGCGAAGAACGACATTAATTTGCGAACTGCGACATAT |
| | | AATGTGCGAATGTACACAAATGGAGAATAGGAGACTCGAACCCCTGACCT |
| | | CTGCGGTGCGATCGCAGCACTCTACCAACTGAGCTAATTCCCCTTAGTCG |
| | | TGCTTAAGTCAAAAACTTTAGCACACTATATATCTTAACACTCAGGAAGG |
| | | ACAGATTTCACATCTTTTTCCAAAAAAACTTCCTGTACCTGCTGCAAATC |
| | | (SEQ ID NO: 217) |
| MRCD01000011.1/ | TnsB | ATGACCCACGCCTCTATCGCCGACGTGGAAAATGGAAAGGCCGAGGCCAA |
| Calothrix | | CATCATCGTGTCCGAGCTGTCTGATGAGGCCCTGCTGAAGATGGAAGTGA |
| sp. HK-06/ | | TCCAGACACTGCTGAAAAACAGCGACTGCAGCACCAGAGGCGAGCTGCTG |
| T73 | | AAACAGTCTGCCGAGAAGCTGGGCAAGAGCGTGCGGACAGTTAGACGGCT |
| | | GGTGGACAAGTGGGAGAAAGAAGGACTGGCCGGCCTGGTGCAGAACCAGA |
| | | GAGATGATAAGGGCAAGCACCGCGTGAACAAGTACTGGCAAGAGTTCGTG |
| | | CTGACCACCTACAAAGAGAACAACAAGGGCAGCAAGCGGATGACCCGGCA |
| | | GCAGGTTTTCATCAGAGCCAAGGCCAGAGCCGACGAGCTGGGAATTGAAC |
| | | CTCCTAGCCACATGACCGTGTACCGGATCCTGAAGCCTCTGATCGACAAG |
| | | CAAGAGCAGGCCAAGAGCATCAGAAGCCCTGGCTGGCGAGGCAGCAGACT |
| | | GAGCGTGAAAACCAGAGATGGCAAGGATCTGCAGGTCGAGCACAGCAATC |
| | | AAGTGTGGCAGTGCGACCACACCAGAGTGGATGTGCTGCTGGTGGATCAG |
| | | CATGGCAAGATCCTGAGCAGACCCTGGCTGACCACAGTGATCGACAGCTA |
| | | CAGCCGGTGCATCATGGGCATCAACCTGGGCTACGATGCCCCTAGCTCTA |
| | | CCGTGGTTGCTCTGGCCCTGAGACACGCCATTCTGCCCAAGCAGTACAGC |
| | | AGCGAGTACGGCCTGCACGAGGAATGGGGCACATATGGCCTGCCTCAGAA |
| | | CTTCTACACCGACGGCGGCAAGGACTTCAGAAGCAACCATCTGCAGCAGA |
| | | TCGGCGTGCAGCTGGGCTTCGTGTGTCACCTGAGAGACAGACCTAGCGAA |
| | | GGCGGCAGCGTGGAAAGACCCTTCAAGACCCTGAACACCGAGCTGTTCAG |
| | | CACCCTGGCCGGCTACACAGGCAGCAATGTGCAAGAGAGGCCTGAGGAAG |
| | | CCGAGAAAGAGGCCTGTCTGACACTGAGACAGCTGGAAAAGATGCTCGTG |
| | | CGGTACATCGTGGACAACTACAACCAGCGGATCGACGCCAGAATGGGCGA |
| | | CCAGACCAGGTTTCAGAGATGGGAGTCTGGCCTGATCGCCATGCCTGATC |
| | | TGCTGAGCGAGAGAGATCTGGACATCTGCCTGATGAAGCAGACCAGACGG |
| | | CAGATTCAGAGAGGCGGCTACCTGCAGTTCGAGAACCTGATCTATCGGGG |
| | | AGAGCTGCTGGCCGGATATGCCGGCGAATCTGTGGTGCTGAGATACGACC |
| | | CCAAGGACATCACAAAGATCCTGGTGTACAGAATGAGCGAGGGCAAAGAG |
| | | ATCTTCCTGGCCAGAGCTTACGCCCAGGACCTGGAAGCCGAAGAACTGTC |
| | | TCTGGATGAGGCCAAGGCCTCCAGCAGAAAAGTGCGCGAAACAGGCAAGG |
| | | CCATCAACAACCGGTCTATCCTGGCCGAGATCCGGGAAAGAGAGACATTC |
| | | CCTACACAGAAGAAAACCCGGAAAGAGCGGCAGAAGCTGGAACAGACCGA |
| | | AGTGAAGAAGGCCAAGCAGCTGACCCCTGTGGAAACCGAGAAGGCCATCG |
| | | ACGTGGTGTCCATCGATGCCAAGCCTACCGGCAAGAACCCAGTGGAAAGC |
| | | GAGCTGTGTACCGAGTCCGGCGAGCTGGATATGCCTGAGGTGCTGGACTA |
| | | CGAGCAGATGCGCGAGGACTATGGCTGGTGA |
| | | (SEQ ID NO: 218) |
| | TnsC | ATGGTGGCCAAAGAGGCCCAAGAGGTTGCCAAGCAGCTGGGCGACATCCC |
| | | CGTGAATGATGAACAGCTGCAGGCCCAGATCCACCGGCTGAACAGAAAGG |
| | | GCTTCGTGCCCCTGGAACAGGTGCAGACACTGCACGATTGGCTGGAAGGC |
| | | AAGCGGCAGTCTAGACAGTCTGGCAGAGTTGTGGGCGAGAGCAGAACCGG |
| | | CAAGACCATGGGCTGTGACGCCTACCGGCTGAGAAACAAGCCTAAGCAAG |
| | | AGGCCGGCAAGCCTCCTACAGTGCCCGTGGCCTATATCCAGATTCCTCAA |
| | | GAGTGCGGCGCCAAAGAACTGTTCGGCGTGATCATGGAACACCTGAAGTA |
| | | CCAAGTGACCAAGGGCACCGTGGCCGAGATCAGAGACAGAACCCTGAGAG |
| | | TGCTGAAAGGCTGCGGCGTGGAAATGCTGATCATCGACGAGGCCGACCGG |
| | | TTCAAGCCCAAGACCTTTGCTGAAGTGCGGGACATCTTCGACAAGCTGGA |
| | | AATCCCTGTGATCCTCGTGGGCACCGACAGACTGGATGGCGTCATCAAGA |
| | | GGGACGAACAGGTGTACAACCGGTTCAGAAGCTGCCACAGATTCGGCAAG |
| | | CTGAGCGGCGAGGAATTCAAGCGGACCGTGGAAATCTGGGAGAAGAAGGT |
| | | GCTGCAGCTGCCTGTGGCCAGCAACCTGAGCAGCAAGACAATGCTGAAGT |
| | | CCCTGGGCGAAGCCACCGGCGGATATATCGGACTGCTGGACATGATCCTG |
| | | AGAGAGAGCGCCATCAGAGCCCTGAAGAAGGGACTGCAGAAGATCGACCT |
| | | GGACACCCTGAAAGAAGTGACCGCCGAGTACCGGTGA |
| | | (SEQ ID NO: 219) |
| | TniQ | ATGGTCGAGGAAGAGTACATCAAACCCTGGCTGTTCCAAGTGGAACCCTT |
| | | CGAGGGCGAGAGCCTGTCTCACTTCCTGGGCAGATTCAGACGGGCCAACG |
| | | AACTGACACCTGGCGGACTGGGAAAAGCCACAGGACTCGGCGGAGCCATT |
| | | GCCAGATGGGAGAAGTTCCGGTTCAACCCTCCACCTGATGGCCAGCAGCT |
| | | GGAAAAGCTGGCCGTGGTCACAGCCATCAACGTGGACAGACTGACCCAGA |
| | | TGCTGGCCCCTCCTGGAACAGGCATGAAGCTGGAACCCATCAGACTGTGC |
| | | GGCGCCTGTTATGCCGAGTCTCCCTGTCACAAGATCGAGTGGCAGTTCAA |
| | | AGAGACACAGGGCTGCAAGCACCACAAGCTGAGACTGCTGAGCGAGTGCC |
| | | CTAATTGCGGCGCCAGATTCAAGGTGCCCGCTCTGTGGATGGATGGCTGG |
| | | TGCCACAGATGCTTCACCCCTTTCGTGGAAATGGTCAAGTGGCAGAAGCA |
| | | GACCAACCACTGA |
| | | (SEQTDNO: 220) |
| | LE | CAGAATGGCAAAGAAGTAGTTTAAAACTGGCACCGCTCAAAAAGTGCTGT |
| | | TTGTAAAGGTTGGTGCCGATAATCTCTAAAGCAGCAGTTCGTGTTGTACA |
| | | TTAACTAATTATTTGTCAATTTAACAAATTATTGTCACAAATGTAGGAAA |
| | | TCCTGAAAACCCTGCCATCTAAAGGTTTGTGGCAGGTTTTTTATTATTTT |
| | | AAGATTCCAAGCCTGTCAAAGCTTAATTAACATATTAACTGTCAAATCCC |
| | | AGAAATATAACACATTAATTGTCAGTTCCCAAAAATCAAACAAATTAATG |
| | | ATTTTATAAAATTTAACAAATTCTTTGTCCATTTATTAATATAATACAAC |
| | | TATGTTTTTATAAAACACATCTATGAAGGATGCAAAATCTACTACAAACT |
| | | CTGCAATGACACATGCCAGCATTGCGGATGTAGAAAACGGTAAAGCAGAA |
| | | GCAAATATTATTGTTTCTGAACTGTCAGATGAAGCTTTGTTAAAAATGGA |
| | | (SEQ ID NO: 221) |
| | RE | GTTTCAACGTCCATCTCAGCTTGAGACGGGTTGAAAGATTAGATACCCCA |
| | | AGTAAGGATCTCCTCCCTTCTTTGTTTCTATTTTATTAAATAAGGTTTAA |
| | | TTATTTAAAATGAATATTTGATACTTGTAGTAATGGTTAATGTTATCGGT |
| | | ATTAACCACAGTGCTATTCTACTGTGGAAACTGGTCAGTTATTTTTGCCA |
| | | GCCTGCACTAGCTCCGGGACACTAATCTGTTAATATTGACATCAATCTGT |
| | | TAAATGTGACATTAATTTGTTAAGAGTGACAAATAATTAGTTAATGTACA |
| | | CGTGTATCAGAATATGGTATTAGTAAATTTACCAGAACTTAAAAGTGGAG |
| | | TTGTTTGAATGACTGAACCACATAAAGCTAACGGTAATGCGGTTGAAGCT |
| | | TGGCCAAGTCTACCATTCGATAAATGGAAGGACACGTATGCAACACTCCA |
| | | TATGTGGACTCAAATTATTGGAAAAATTCGACTTGTGCAAAGTCCATTCT |
| | | (SEQ ID NO: 222) |
| Ga0209902_ | TnsB | ATGGGCGAGACACTGAACAGCAACGAGGTGGACGAGAGCCTGGTGCTGTA |
| 100058/ | | CGATGGCTCTGACGAAGTGGATGAGATCAGCGAGAGCGAGGACACCAAGC |
| T74 | | AGAACAACGTGATCGTGACCGAGCTGAGCGAAGAGGCCAAGCTGAGAATG |
| | | GAAGTGCTGCAGAGCCTGATCGAGCCCTGCGACAGAAAGACCTACGGCAT |
| | | CAAGCTGAAGCAGGCCGCCGAGAAGCTGGGAAAGACCGTCAGAACAGTGC |
| | | AGCGGCTGGTCAAGAAGTACCAAGAGCAGGGACTGAGCGGCGTGACAGAG |
| | | GTGGAAAGATCTGACAAAGGCGGCTACCGGATCGACGACGACTGGCAGGA |
| | | CTTCATCGTGAAAACCTACAAAGAGGGCAACAAAGGCGGACGGAAGATGA |
| | | CCCCTGCTCAGGTGGCCATCAGAGTGCAAGTTCGCGCTGGACAGCTGGGC |
| | | CTCGAGAAGTACCCTTGTCACATGACCGTGTACCGGGTGCTGAACCCCAT |
| | | CATCGAGCGGAAAGAACAGAAACAGAAAGTGCGGAACATCGGCTGGCGGG |
| | | GCAGCAGAGTTTCTCACCAGACAAGAGATGGCCAGACACTGGACGTGCAC |
| | | CACAGCAATCACGTGTGGCAGTGCGACCACACCAAGCTGGATGTGATGCT |
| | | GGTGGACCAGTACGGCGAAACCCTGGCTAGACCTTGGCTGACCAAGATCA |
| | | CCGACAGCTACAGCCGGTGCATCATGGGCATCCACCTGGGCTTTGATGCC |
| | | CCTAGCTCTCTGGTGGTGGCCCTGGCTATGAGACACGCCATGCTGAGAAA |
| | | GCAGTACAGCAGCGAGTACAAGCTGCACTGCGAGTGGGGCACATATGGCG |
| | | TGCCCGAGAACCTGTTTACCGACGGCGGCAAGGACTTCAGAAGCGAGCAC |
| | | CTGAAGCAGATCGGCTTCCAGCTGGGATTCGAGTGTCACCTGAGAGACAG |
| | | ACCTCCAGAAGGCGGCATCGAGGAAAGAGGCTTCGGAACAATCAATACCG |
| | | ACTTCCTGAGCGGCTTCTACGGCTACCTGGGCAGCAACGTGCAAGAGAGA |
| | | GCTGAGGGCGCCGAGGAAGAGGCCTGTATCACACTGAGAGAACTGCATCT |
| | | GCTGATCGTGCGGTACATCGTGGACAACTACAACCAGAGAATCGACGCCA |
| | | GAAGCGGCAACCAGACCAGATTCCAGAGATGGGAAGCCGGCCTTCCTGCT |
| | | CTGCCCAACCTGGTCAACGAAAGAGAGCTGGACATCTGCCTGATGAAGAA |
| | | AACCCGGCGGAGCATCTACAAAGGCGGATACGTGTCCTTCGAGAACATCA |
| | | TGTACCGGGGCGACTACCTGTCTGCCTATGCCGGCGAATCTGTGCTGCTG |
| | | AGATACGACCCCAGAGACATCAGCACCGTGTTCGTGTACAGACAGGACAG |
| | | CGGCAAAGAGGTCCTGCTGTCTCAGGCCCACGCCATCGATCTGGAAACCG |
| | | AGCAGATCAGCCTGGAAGAGACAAAGGCCGCCAGCAGAAAGATCCGGAAT |
| | | GCCGGCAAGCAGCTGAGCAACAAGTCTATCCTGGCCGAGGTGCAGGACCG |
| | | GGACACCTTTATCAAGCAGAAGAAGAAGTCCCACAAAGAGCGGAAGAAAG |
| | | AGGAACAGGCCCAAGTCAACTTCGTGAAGCCTCCTCAGACCAACGAGCCC |
| | | GTGGAAACCGTGGAAGAGATCCCTCAGCCTCAGAAAAGACGGCCCAGAGT |
| | | GTTCGACTACGAGCAGCTGCGGAAGGACTACGACGATTGA |
| | | (SEQ ID NO: 223) |
| | TnsC | ATGGCCGAGGACTACCTGAGAAAATGGGTGCAGAACCTGTGGGGCGACGA |
| | | CCCCATTCCTGAAGAACTGCTGCCCATCATCGAGCGGCTGATCACACCTA |
| | | GCGTGGTGGAACTGGAACACATCCAGAAGATCCACGACTGGCTGGACAGC |
| | | CTGAGACTGAGCAAGCAGTGCGGCAGAATTGTGGCCCCTCCTAGAGCCGG |
| | | CAAGAGCGTGACATGTGACGTGTACAAGCTGCTGAACAAGCCCCAGAAGA |
| | | GAACCGGCAAGCGGGACATTGTGCCCGTGCTGTATATGCAGGTCCCCGGC |
| | | GAATGTTCTGCCGGCGAACTGCTGACACTGATCCTGGAAAGCCTGAAGTA |
| | | CGACGCCATCAGCGGCAAGCTGACCGACCTGAGAAGAAGAGTGCTGCGGC |
| | | TGCTGAAAGAAAGCAAGGTGGAAATGCTCGTGATCGACGAGGCCAACTTC |
| | | CTGAAGCTGAACACCTTCAGCGAGATCGCCCGGATCTACGACCTGCTGAA |
| | | GATCAGCATCGTGCTCGTGGGCACCGACGGCCTGGACAACCTGATCAAGA |
| | | AAGAGCCCTACATCCACGACCGGTTCATCGAGTGCTACAGACTGCCTCTG |
| | | GTGTCCGAGAAGAAATTCCCCGAGTTCGTGCAGATCTGGGAAGATGAGGT |
| | | GCTGTGCCTGCCTGTGCCTAGCAATCTGACCAAGCGCGAGACACTGATGC |
| | | CCCTGTACCAGAAAACCTCCGGCAAGATCGGCCTGGTGGACAGAGTTCTG |
| | | AGAAGGGCCGCCATCCTGAGCCTGAGAAAGGGCCTGAAGAATATCGACAA |
| | | GGCCACACTGGACGAGGTGCTCGAGTGGTTCGAATGA |
| | | (SEQ ID NO: 224) |
| | TniQ | ATGGAAATCCCTGCCGAGCAGCCCAGATTCTTCCAGGTGGAACCTCTGGA |
| | | AGGCGAGAGCCTGTCTCACTTCCTGGGCAGATTCAGAAGAGAGAACTACC |
| | | TGACCGCCACACAGCTGGGCAAGCTGACAGGCATTGGAGCCGTGATCAGC |
| | | AGATGGGAGAAGTTCTACCTGAATCCGTTTCCGACACCTCAAGAGCTGGA |
| | | AGCCCTGGCCGCTGTGGTGGAAGTGAAAGTGGACCGGCTGATCGAGATGC |
| | | TGCCTCCTAGAGGCGTGACCATGAAGCCCAGACCTATCAGACTGTGCAGC |
| | | GCCTGCTACCAAGAGTCCCCTTGCCACAGAGTGGAATGGCAGTTCAAGGA |
| | | CGTGATGGTCTGCGACTGCCTGAGACACTGCCCTCTGAACAACAGACACC |
| | | AGCTGGCCCTGCTGACCAAGTGCACCAATTGCGAGACACCCTTTCCTATA |
| | | CCTGCCGACTGGGTGCAGGGCGAGTGCCCTCACTGTTTTCTGCCCTTCAC |
| | | CAAGATGGCCAGACGGCAGAAGCGGTACTGA |
| | | (SEQ ID NO: 225) |
| | LE | AGTTTTGTGTTGCACAAACCATCCTAAGCGACATTAGTTTGCAAAAAACG |
| | | ACATTAATTTACGAATCGCGACCTTTAATTTGCGAATATACAACAGATTT |
| | | TGTCGATTAACTAATTATTTGTCGTCTTAACAAATTAATGTCGCCCAAAT |
| | | CTTCAAGACTATAATCCTTATGTATCAAAGGTTATAGCCTTTTGAACTTA |
| | | TATTGGCTATCATCAAATATTTAACTAATTAAGTGTCGTCTTTTAATTAA |
| | | TTAACATTTTAAATGTCGTTTTTTCAAAAAACACCTTTCCAAATTTTTCT |
| | | TTTG |
| | | CTCATAACAAAATAACTGTCGTCTTTTGGAAGTGAGTGAAAAATATAAAA |
| | | TTAAATGTCGCTTTTTGGAACAAAGTAGTATGATATTTATTAGGCAATAG |
| | | TAGCTATGTAACAACAAAAACATAGTTAGATTGAAGTCTTCTTTTTTGTC |
| | | TCTAGCTACGAAGTCATTACCCTTGCTGCGATTAAATTTAGACGCAAGCT |
| | | AATTTCGCTCTTAGACTTGCTGTACCGTATTGCCTAACCAACTAGTTTCA |
| | | AGCGATGAAGTTTGTTTATGGGTGAAACGCTAAACTCCAACGAGGT |
| | | (SEQTDNO: 226) |
| | RE | GTTTCAACAACCATCCCGGCTAGGGGTGGGTTGAAAGTTTAAGTTCTATT |
| | | AACTCCAAGTTTTAATAATTGCATGGCAATAACAATCCTTTTTAGAAAGG |
| | | ATTTAAGAGGGTTGAAAGGAATGTCACCTTCCCAAGAATACTTTTCAAAA |
| | | GCTATTTTGGGTTAGGGAAGAATAATCACAGATAACTAATATGCACAAGT |
| | | AAGTCTAAAATAGGGATAAGTCTGTCGATTAGTCCAATAGCAAGGCATCT |
| | | TGTTAGACGACATTAATTTGTTAACGTTAGTTGGAACTAATTCGACGACA |
| | | TTAATTCGTTAACAGCGACATTAATTTGTTAATGACGACATTAATCTGTT |
| | | AACGACGACATTAATCTGTTAACGACGACAAATAATCTGTTAATTGACAG |
| | | ATTTGAAAGCGGGTGATGGGACTCGAACCCACGACGTTCACCTTGGGAAG |
| | | GTGACATTCTACCACTGAATTACACCCGCAAATGGAGTTTAGGCTCAATA |
| | | (SEQ ID NO: 227) |
| a0167663_ | TnsB | ATGACACTGGTGCTGCACACCATCAGCATCTTCGTGCTGCTGACCGAGAG |
| 1001047/ | | CAGATTCGCCTCTCCTCCTCTGCTGGCCAACTTCCTGTCTAGCAGCAAGC |
| T75 | | TGTTCCAGAAAGAGAGCGGCATCTTCATCCTGTTCACCCTGAAGTGGCAG |
| | | CAGCCCAGCATGGATGAATCCCAGGTGGCCTGCCTGGATGCCGATCCTCA |
| | | GGATTTCGATGAGGTGGTGCTGAGCAGCCACGCCTTCGATACCGATCCTA |
| | | GCAAGATCCTGATCGACAGCAGCGACCGGCACAAGCTGCGGTTCAGACTG |
| | | ATTGAGTGGCTGGCCGAGGCTCCCAACAGAAAAGTGAAGGCCGAGAGAAA |
| | | GGGCGCCATCAGCAAGACCCTGGACATCAGCACCAGACAGGTGGAACGGA |
| | | TGCTGAACCAGTACAACGCCGACAAGCTGAGAGAGACAGCCGGCATCGAG |
| | | AGAGCCGACAAGGGCAACCACAGAATCGACGAGTACTGGCAGGACTACAT |
| | | CCGCGAGGTGTACGAGAAGTCCCTGAAGGACAAGCACCCTCTGAAGCCCG |
| | | CCGATGTTGTGCGGGAAGTGCATAGACACGCCGTGATCGACCTGAGACAC |
| | | GAGGAAGGCGATTGGCCTCACGCCGCCACCGTGTACAGAATCCTGAAGCC |
| | | TCTGGTCAAGCGGCACAAGAGGAACCAGAAGATCAGAAACCCTGGCAGCG |
| | | GCAGCTGGCTGGCTGTGGAAACAGAGGATGGCAAGCTGCTGAAGGCCAAT |
| | | TTCAGCAACCAGATCGTGCAGTGCGACCACACCAAGCTGGACATCCGGAT |
| | | CATCGACAAGGACGGAAAGCTGCTGTCTTGGAGGCCTTGGCTGACCACCG |
| | | TGGTGGACACCTTTAGCAGCTGCCTGATCGGCTACCAGCTGTGGCACAAA |
| | | CAGCCTGGCGCTCACGAAGTGGCCCTGACACTGAGACATGCCATCCTGCC |
| | | TAAGCAGTACCCCGCCGACTACGAGCTGGAAAAGCCCTGGAATATCTACG |
| | | GCGCTCCCCTGCAGTACTTCTTCACCGACAAAGGCAAGGACCTGAGCAAG |
| | | AGCAAGCTGATCAAGGCCCTGGGCAAGAAACTGGGCTTCCAGTGCGAGCT |
| | | GAGGGACAGACCTATCCAAGGCGGCATCGTGGAACGGCTGTTCAAGACCA |
| | | TCAACACCGAGGTGCTGGCTCCTCTGCCAGGCTACATCAGCAAAGAAGAG |
| | | GACGGCGCCGAGCGGGCCGAAAAAGAGGCCTGTTTTACCATCGAGGACAT |
| | | CGATAAGATCCTGGCCAGCTACTTCTGCGACGACTACAACCACCAGCCTT |
| | | ATCCTAAGGACCCTCACGACACCAGATTCGAGCGGTGGTTTAGAGGCATG |
| | | GGCAACAAGCTGCCCGAGCCTATGGATGAGCGCGAGCTGGATGTGTGCCT |
| | | GATGAAGGAAGAACAGAGAGTCGTTCAGGCCCACGGCAGCGTGTACTTCG |
| | | AGAACCTGACCTACAGATGCGAGGAACTGCGGAGCCTGAAGGGCGAGTAC |
| | | GTGACCGTGACCTACGATCCCGACCACATTCTGACCCTGTACATCTACCG |
| | | GCAGAGCACCTCTGATGAGGCCGGCGAGTTTATCGGATACGCCCACGCCA |
| | | TCAACATGGACACCCAGGATCTGAGCCTGGACGAGCTGAAGCAGCTGAAC |
| | | AAAGCCAGAAGCAGCGCCAAGAGAGAGCACAGCAATTTCGACGCCCTGGT |
| | | GTCCCTGGACAAGAGACAGAAACTGGTGGAAGAGAGGAAGCAAGAGAAGA |
| | | AAGAGCGGCAGCGGAGCGAGCAGAAGAAGCTGAGGGGAAAGTCCAAGCAG |
| | | GACAGCAAGGTGGTGGAACTGAGAAAGGACAGAGCCGGCAAGAGCACAAA |
| | | CCCCACCGAGTCCATGGAACTGCTGCCTGAGAGAGTGTCCCCTGAGCAGA |
| | | TGAAGCCACTGAGCCCTCCAACACCTCCTATTCCAGAACCTGCCGCCAGC |
| | | GCTCCTTCTACACAAGAAAGACACAAGCTCGTGATCCCCAAGAATCAGAC |
| | | CCTGAAGCGGATCTGGTGA |
| | | (SEQ ID NO: 228) |
| | TnsC | ATGGCTCAGCCTCAGCTGGCTGTGCATGTGCCTGTGGAAGTTCTGGCCCC |
| | | ACAGCTGGATCTGACAGACGTGCTGGCCAAGACAGCCGCCATCGAGGAAC |
| | | TGTTCAAGACCGCCTTCATTCCCACCGACAGAGCCAGCCAGTACTTCAGA |
| | | TGGCTGGACGAGCTGCGGCTGCTGAAGCAGTGTGGAAGAGTGATCGGCCC |
| | | CAGAGATGTGGGCAAGAGCAGATCCTCCGTGCACTACAGAGAAGAGGACC |
| | | GGAAGCGGATCAGCTGCGTGAAGGCCTGGTCTAACAGCAGCAGCAAGCGG |
| | | CTGTTCAGCCAGATCCTGAAGGACATCAACCACGCCGCTCCTCGGGGCAA |
| | | GAGACAGGATCTGAGATCTAGACTGGCCGGCTGCCTGGAACCTTTCGGAA |
| | | TCGAACTGCTGCTGATCGACAACGCCGAGAACCTGCAGAGAGAGGCCCTG |
| | | ATCGATCTGAAGCAGCTGCACGAGGAATCCGGCGTGCCAGTGATTCTCGT |
| | | TGGAGGCCAGGACCTGGATAGCAGCCTGCAGAATCTGGACCTGCTGACCT |
| | | GCTTTCCCACACTGTTCGACTTCGACCGGCTGGACTACGACGACTTCCAG |
| | | AAAACCCTGCGGACCATCGAACTGGATCTGCTGGCACTGCCCCAGCCTAG |
| | | CAATCTGTCTGAGGGCACCCTGTTCGAGATCCTGGCCACATCTACCCAGG |
| | | CCAGAATGGGCGTGCTGATCAAGATCCTGACCAAGACCGTGCTGCACAGC |
| | | CTGAAGAAAGGCCACGGAAAGGTGGACGAGGCCATCCTGCACAATATCGC |
| | | CTCCAGATACGGCAAGCAGTACACAAGCCCCGAGGCCAGAAAGAAGCCTG |
| | | GACTGTCTGAAGGCTGA |
| | | (SEQ ID NO: 229) |
| | TniQ | CTGAAGTCCATCTTCCTGGAAGGCGAGAGCGCCATGAGCCACCTGGAAGA |
| | | GAATGTGCCCAGACTGGGCTACGTGGAACCCCTGGAACACGAGAGCATCA |
| | | GCCACTACCTGGGCAGACTGCGGAGATTCAAGGCCAACTCTCTGCCCAGC |
| | | GCCTACTCTCTGGGACAAGCCGCTGGAATTGGAGCCGTGACAGCCAGATG |
| | | GGAGAAGCTGTACTTCAACCCCTTTCCAACTGCCGCCGAGCTGGAAGCCA |
| | | TCGAGAGACTGATCGGCCTGAACACCGGCAGACTGGAAGCTATGCTGCCC |
| | | CACAGAGGCATGACCCTGCAGCCTAGACCTATCAGACTGTGCGGCGCCTG |
| | | CTACACCGAGTCTCCCTGTCACAGAATGGAATGGCAGTACAAGGACGTGG |
| | | TGGCCGTGTGTCCTCACCACTCTCTGAGACTGCTGGAAAGATGCCCCAGC |
| | | TGCAAGACCCCTTTCAAGATCCCTGCTCTGTGGACCGACGGCACCTGTGA |
| | | TCACTGCGGCATGAGATTCACCAGCATGGTCAAGTACCAAGAGCGGATCA |
| | | AGAAAACCGGCTGA |
| | | (SEQ ID NO: 230) |
| | LE | GAGCGTTACCTCGTTAAGGGTCGCTTGATCTGCTAATTCTCTCAGCGCTC |
| | | GTGATTCTTGGCTATGAATTTGCTGATCAGCGCAGATGATATGGGCCAGC |
| | | AGCAAGAAGCCATAGTCTAATGCTGCACTAGATTGAGAAGATACAATAGC |
| | | TACCATCTGGAGATTCTTGTTGAAGTCTTGATTTATCTAGCGAACTTCTC |
| | | ACAGGATGCCCGGATTTGACTCTAGTGCTTCACACAATCTCTATCTTTGT |
| | | ATTGCTTACCGAGAGCCGCTTCGCCTCTCCTCCATTACTGGCAAATTTCC |
| | | TATCGTCATCTAAACTATTTCAGAAGGAAAGTGGTATTTTTATACTATTC |
| | | ACTTTGAAGTGGCAGCAACCTTCTATGGACGAAAGCCAAGTTGCCTGTTT |
| | | AGATGCTGACCCACAAGACTTCGATGAAGTGGTGTTGAGCAGTCATGCCT |
| | | TCGACACTGACCCATCCAAAATCCTGATAGACTCATCAGACCGTCACAAA |
| | | (SEQ ID NO: 231) |
| | RE | GTTGCAATCGCCCTCCCAAAAACGGATGGGCTGAAGCCATTTTTAATTCT |
| | | TAAAGCTTTGGGGGGCTGAAAGGAGCGCTGCAATGGCACTGTTAATTGCA |
| | | TTCAGTCATACTTAACAGTTGCGCCTGTAGCGACATTATTCTGCGAATTG |
| | | TAAAAGATTCGCCTTTTGCGACATTATTCTGCAAATTTCAGTAAGATACA |
| | | GCAAAAAAGTCCTTAAACGACATTAATTTGCGAATTGCGACATTTAATGT |
| | | GCGAACGTACAGAAAGAAATGGAGTTAAGCGGGTTCGAACCGCTGACCTC |
| | | TGCAATGCCATTGCAGCGCTCTACCAACTGAGCTATAACCCCTCATTTCG |
| | | TATTTTATCATGGCGCAATCCTAATCATTCAGTCAAGCGTCAACTTTGGT |
| | | AAGCTGATAAACGTATCGCCCCTCAACAGAAAATGAGAGCCGTTTGAGAC |
| | | TTATGACTGAGACACCCCAAGAGTTACCTAATTCTGATCTTGAGACAGGT |
| | | (SEQ ID NO: 232) |

TABLE 5
Example Transposon Systems

| Locus | Sequences | | |
|---|---|---|---|
| Ga0334928_ | TnsB | DNA | ATGACGGCAGATAACCATGATGCCTCTGCAATTGTGACCGAACTTTCGCATGAGGCAAAACTGAA |
| 000020 | | | GCTAGACATTATTGAGAGTTTGCTGGAACCGTGCGATCGCCAAACTTACGGGCAACGACTTAAAG |
| | | | AAGCTGCCAATAAACTTGGCAAATCAGTAAGAACGGTGCAGCGATTGGTAGAAAAGTGGGAAGC |
| | | | AGAAGGTTTACTAGCCTTAACTGGCACAGAGAGGGCAGATAAAGGCAAGCATCGCATTTCTCAA |
| | | | AAGTGGCAAGACTTTATTATCAAAACCTACCGTGAGGGGAATAAGTGTAGTAAGCGGATGTCCCG |
| | | | CAAGCAGGTTGCTTTAAGGGTTGAAGTTAGAGCTAAGGAATTAGGAGAAGAGGATTATCCGAATT |
| | | | ACCGCACAGTTTATCGAGTATTACAACCCTTGATTGAAGCGCAAGAGCAAAAGAAAGGGGTTCGT |
| | | | AGTCCAGGGTGGCGAGGTTCACACTTATCGGTTAAAACCCGCACAGGCGAGAATATITCAGTGGA |
| | | | GTACAGCAACCATGTGTGGCAGTGTGACCATACTTGGGTCGATGTGCTGGTCGTTGATATAGAGG |
| | | | GGGTAATTATCGGTCGCCCCTGGTTAACGACAGTAATTGATACATACTCACGCTGCATTATGGGT |
| | | | ATTCGCGTGGGGTTTGATGCACCGAGTGCTGAGGTAGTAGCGTTGGCGTTGCGTCATGCAATGCT |
| | | | ACCCAAAAACTATGGGGCTGAGTATGGGTTGCATTGTCAGTGGGGAACGTATGGCAAACCAGAA |
| | | | TATTTATTTACAGATGGCGGCAAAGATTTTCGCTCAGAACACTTAAAGCAAATTGGCGTACAGTT |
| | | | AGGTTTTAGTTGTATTCTACGCGATCGCCCTAGTGAAGGTGGTGTGGTTGAGCGCCCGTTTGGGAC |
| | | | TTTGAATACAGAGTTATTTGCAGGATTCCCTGGATATGTTGGCTCAAATGTCCAACAACGTCCAGA |
| | | | ACAAGCGGAAAAGGAAGCGTGTTTAACTTTACGGGAACTAGAAAAGCGGATTGTTCGCTACATC |
| | | | GTAGATAACTATAATCAACGAATTGATAAGCGCATGGGAGATCAGATGCGCTATCAGCGTTGGGA |
| | | | AGCAGGTTTATTAGCCACACCAGATTTAATTGGTGAGCGAGATTTAGATATTTGTTTGATGAAGC |
| | | | AAACCAATCGCTCAATTTACCGAGAGGGTTATATCCGCTITGAGAATTTGATGTATCAAGGAGAG |
| | | | CATTTAGCGGGATATGCAGGGGAACGGGTGGTTTTGCGCTACGACCCTAGAGACATTACCAGCGT |
| | | | GCTGGTTTATCAACGGCAAAAAGATAAAGAAATATTTTTAGCAGGGGCGAATGCGACTGGGTTAG |
| | | | AGACAGAACAAGTATCGCTAGAAGAAGTTAAGGCAAGTAATAAGAAGGTTAGGGAAAAAGGAA |
| | | | AAACGATTAGTAATCATTCGATTTTGGAAGAAGTAAGAGACAGAGATATTTTTGTTGCCAAGAAG |
| | | | AAGACCAAGAAAGAAAGGCAAAAGGAAGAACAAAAACAATTACACTCTGCTGTCCCGAAATCCA |
| | | | AGCCTTTTGAGGTTGAACCAGAACCAGAGATTGAAGATACGCCAGTACCTAAAAAGAAACCAAG |
| | | | GGTATTGAATTATGACCAGTTAAAAGAGGATTATGGGTGGTAA (SEQ ID NO: 233) |
| | | Protein | MTADNHDASAIVTELSHEAKLKLDIIESLLEPCDRQTYGQRLKEAANKLGKSVRTVQRLVEKWEAEG |
| | | | LLALTGTERADKGKHRISQKWQDFIIKTYREGNKCSKRMSRKQVALRVEVRAKELGEEDYPNYRTVY |
| | | | RVLQPLIEAQEQKKGVRSPGWRGSHLSVKTRTGENISVEYSNHVWQCDHTWVDVLVVDIEGVIIGRP |
| | | | WLTTVIDTYSRCIMGIRVGFDAPSAEVVALALRHAMLPKNYGAEYGLHCQWGTYGKPEYLFTDGGK |
| | | | DFRSEHLKQIGVQLGFSCILRDRPSEGGVVERPFGTLNTELFAGFPGYVGSNVQQRPEQAEKEACLTLR |
| | | | ELEKRIVRYIVDNYNQRIDKRMGDQMRYQRWEAGLLATPDLIGERDLDICLMKQTNRSIYREGYIRFE |
| | | | NLMYQGEHLAGYAGERVVLRYDPRDITSVLVYQRQKDKEIFLAGANATGLETEQVSLEEVKASNKK |
| | | | VREKGKTISNHSILEEVRDRDIFVAKKKTKKERQKEEQKQLHSAVPKSKPFEVEPEPEIEDTPVPKKKP |
| | | | RVLNYDQLKEDYGW (SEQ ID NO: 234) |
| | TnsC | DNA | ATGGCAGAAAATAAATCTCAATCTGTTGCCGAACAATTAGGAGAAATCAAGTCTTTAGATGGCAA |
| | | | ATTACAAGCGGAAATTGACCGATTAAGAGAAAAAATTATTGTAGAGTTGGAGCAGGTTAGCGAC |
| | | | CTCCATAATTGGTTAGAAGGAAAGCGGCGATCGCGTCATTCTTGTAAAATTGTCGGGGATTCGCG |
| | | | GACAGGAAAAACTGTAGCTTGTGATTCTTATAGATTAAGGCACAGACCAATTCAAGAAGTAGGA |
| | | | AAACCGCCAACTGTACCTGTCGTGTATATTCAACCTCCCCAAGAATGCAGTTCAAGAGAGTTATTT |
| | | | CGGGTGATTATTGAGCATCTGAAATACAAAATGGTAAAGGGAACGGTGGGGGAAATCCGCAGTA |
| | | | GGACGCTACAGGTTCTTAAACGCTGCAATGTAGAAATGTTGATTATTGATGAAGCGGATCGGTTA |
| | | | AAGCCCAAAACTTTTGCGGATGTACGGGATATTTTTGACAATTTGGGTATTTCTGTAGTCTTAGTA |
| | | | GGAACAGATCGTCTCAATACCGTGATTAAAAGAGATGAACAGGTTTATAACCGTTTCCGTCCTTC |
| | | | TTATCCTTTTGGTAGGTTGCAGGGGAATAAGTTTAAGGAGACAGTGGAGATTTGGGAACAGGATA |
| | | | TTTTGCGTTTACCTGTACCCTCGAATCTTGGTAGTAAGCCAATGTTAAAGATCCTGGGAGAAGCAA |
| | | | CAGGCGGTTACATTGGGTTGATGGATATGATTTTGCGTGAAGCGGGAATTAGGGCTTTGGAAAAG |
| | | | GGATTAACGAAGATCGATCGGGAAACTTTGGAAGAGGTAGCACAGGAGTATAAGTGA (SEQ ID |
| | | | NO: 235) |
| | | Protein | MAENKSQSVAEQLGEIKSLDGKLQAEIDRLREKIIVELEQVSDLHNWLEGKRRSRHSCKIVGDSRTGK |
| | | | TVACDSYRLRHRPIQEVGKPPTVPVVYIQPPQECSSRELFRVIIEHLKYKMVKGTVGEIRSRTLQVLKR |
| | | | CNVEMLIIDEADRLKPKTFADVRDIFDNLGISVVLVGTDRLNTVIKRDEQVYNRFRPSYPFGRLQGNKF |
| | | | KETVEIWEQDILRLPVPSNLGSKPMLKILGEATGGYIGLMDMILREAGIRALEKGLTKIDRETLEEVAQ |
| | | | EYK (SEQ ID NO: 236) |
| | TniQ | DNA | ATGGATCAGATTCAACCCTGGTTGTTTACGATCGCACCACTAGAAGGAGAAAGTTTAAGTCATTT |
| | | | TCTAGGACGTTTTCGGCGGGAAAATGATTTATCGGCTTCAGGGTTAGGAAAAGAGGCGGGAATTG |
| | | | GTGCTGTTGTAGCACGATGGGAAAAGTTCTATCTCAATCCGTTTCCCTCGCTTAGAGAGTTGGAAG |
| | | | CATTGGCTAAGGTGGTTCAGGTGGATAGCGATCGCTTGCGGGAGATGTTACCACCTGAAGGGGTG |
| | | | GGGATGAAGCACGAACCAATTCGCCTCTGTGGGGCGTGTTATGCCGAGTCGCCTTGTCACAAGAT |
| | | | TAAATGGCAGTTTAAGAAGACGCAGGGATGCGATCGCCACCAGCTAAGTTTACTTTCAGAATGCC |
| | | | CTAACTGTGGAGCAAGGTTTAAAATTCCGGCTTTATGGGCAGATGGATGGTGTCAGCGTTGTTTTA |
| | | | CAACTTTTGCAGAAATGGGAAAAATGCAAAAGGGTCAAAGAAACAGTCTGTGA (SEQ ID NO: 237) |
| | | Protein | MDQIQPWLFTIAPLEGESLSHFLGRFRRENDLSASGLGKEAGIGAVVARWEKFYLNPFPSLRELEALAK |
| | | | VVQVDSDRLREMLPPEGVGMKHEPIRLCGACYAESPCHKIKWQFKKTQGCDRHQLSLLSECPNCGAR |
| | | | FKIPALWADGWCQRCFTTFAEMGKMQKGQRNSL (SEQ ID NO: 238) |
| Ga0334957_ | TnsB | DNA | ATGTCTAATGCTCATCCCTCAGAAACGATTCCAGATGAGAGGGGCAACCTCGAAGAAGCCAATAC |
| 000173 | | | CATCGCCTCTGAGTTTTCCGACGAGGCGAAGCTCAAGATCGAAGTGATTCAAAGCCTTATGGAGG |
| | | | CAGGCGATCGCGCCACGTATGCCCAAAAGCTTAAAGAAGCTGCTCAAAAACTGGGCAAGTCGGT |
| | | | GCGGACGGTGCGGCGGTTAGTGGATAAATGGGAAGAACAAGGGCTGTCGGGTCTGGTTGAAACT |
| | | | GAACGCTCTGATAAAGGTAAGCACCGAGTTGATACTGACTGGCAAGATTTAATTCTCACAACCTA |
| | | | TCGGGAAGGAAATAAGGGCAGTAAACGGATGACCCCGAAGCAGGTTTTCCTAAGAGTACAAGCA |
| | | | AAAGCTCACGAATTAGGGGTCAAGTCTCCCAGCCACATGACGGTGTACCGCATCCTCAACCCTTT |
| | | | AATTGAAAAACAAGAAAAAGCCAAAAGCATTCGCAGTCCGGGATGGCGAGGATCGCGTTTGTCG |
| | | | GTTAAAACTCGCGACGGTGCAGATTTGGCAGTGGAGTACAGCAACCAGGTGTGGCAATGCGATC |
| | | | ACACTCGCGCTGATCTGTTGCTAGTGGATCAGCATGGGGAAATTTTAGGTCGTCCTTGGTTGACCA |
| | | | CGGTTATTGATACCTATTCTCGCTGCATTCTGGGCATTAATTTAGGCTTTGACGCTCCCAGTTCTCA |
| | | | GGTAGTGGCTTTAGCTTTGCGCCATGCTATTTTGCCGAAGCAATACGGTGCAGAATATGGTCTGCA |
| | | | TTGCCAGTGGGGAACTTATGGGAAGCCAGAGCATTTTTATACTGATGGCGGTAAGGATTTTCGTT |
| | | | CGGAACATTTGCAGCAAATAGGAGTGCAGTTAGGGTTTGTTTGCCATTTGCGCGATCGCCCCTCTG |
| | | | AAGGTGGTATTGTCGAGCGTCCCTTTGGCACATTGAACACCGAGCTATTTTCCACTTTGCCGGGAT |
| | | | ATACGGGGTCAAATGTACAAAAGCGGCCGGAAGATGCAGAAAAAGAAGCCTGTTTGACTCTGCG |
| | | | GCAGTTAGAGCAGCATTTAGTCCGCTATCTTGTTGATAACTACAATCAGCGTCTTGACGCTCGGAT |
| | | | GGGCGACCAAACAAGGTTTCAACGATGGGAAGCTGGTTTACTTGCTATGCCACCTTTAATCTCAG |
| | | | AAAGAGATTTGGATATTTGCTTGATGAAACAGTCGAGGCGAATTATTCAAAGGGGGGGCTACTTA |
| | | | CAATTTGAAAACTTTATGTATCGGGGTGAATATTTGGCGGGTTACGCAGGGGAAAGTGTAGTGCT |
| | | | GCGATATGACCCCAAAGATATTACAAGGCTTTTGGTTTACCGCAATGAGGGTAGTAAGGAGGTAT |
| | | | TTTTAGCCCGTGCAGTAGCACAAGATTTAGAAGCTGAAGAACTATCTTTAGATGAGGCGAAAGCT |
| | | | AGCAGCCGCAAGGTTCGGGAAGCTGGGAAGGCGGTTAGTAACCGTTCGATTTTGGATGAGGTGC |
| | | | GCGATCGCGACACTTTCGTCACTCAGAAGAAAACGAAAAAGGAACGCCAAAAGGCTGAACAAGG |
| | | | TGAAATCCGTAAGGCAAAACAGCCTGTATCTATGGAACCGGAACCGGAGGAAGTGGTATCGAAC |
| | | | AACAGTGAAGCTGAACCAGAAATGCCGGAAGTATTGGATTACGAACAAATGCGCGAAGATTACG |
| | | | GGTGGTAA (SEQ ID NO: 239) |
| | | Protein | MSNAHPSETIPDERGNLEEANTIASEFSDEAKLKIEVIQSLMEAGDRATYAQKLKEAAQKLGKSVRTV |
| | | | RRLVDKWEEQGLSGLVETERSDKGKHRVDTDWQDLILTTYREGNKGSKRMTPKQVFLRVQAKAHEL |
| | | | GVKSPSHMTVYRILNPLIEKQEKAKSIRSPGWRGSRLSVKTRDGADLAVEYSNQVWQCDHTRADLLL |
| | | | VDQHGEILGRPWLTTVIDTYSRCILGINLGFDAPSSQVVALALRHAILPKQYGAEYGLHCQWGTYGKP |
| | | | EHFYTDGGKDFRSEHLQQIGVQLGFVCHLRDRPSEGGIVERPFGTLNTELFSTLPGYTGSNVQKRPEDA |
| | | | EKEACLTLRQLEQHLVRYLVDNYNQRLDARMGDQTRFQRWEAGLLAMPPLISERDLDICLMKQSRRI |
| | | | IQRGGYLQFENFMYRGEYLAGYAGESVVLRYDPKDITRLLVYRNEGSKEVFLARAVAQDLEAEELSL |
| | | | DEAKASSRKVREAGKAVSNRSILDEVRDRDTFVTQKKTKKERQKAEQGEIRKAKQPVSMEPEPEEVV |
| | | | SNNSEAEPEMPEVLDYEQMREDYGW (SEQ ID NO: 240) |
| | TnsC | DNA | ATGACGAATCAAGAAGCCCAAGCAGTCGCCAAGGAATTAGGCGATATTCCGCTTAATCAAGAAA |
| | | | AAATTCAAGCGGAAATTCAAAGATTGAACCGCAAGACTTTTGTGCAGTTGGAACAGGTGAAAATT |
| | | | CTCCATGACTGGCTGGAAGGAAAGCGACAGTCTCGGCAGTCGGGGCGAGTTGTGGGCGAGTCGA |
| | | | GGACGGGCAAAACTATGGGGTGTGATGCTTACAGGTTACGGCACAAACCCAAGCAGCAGCCGGG |
| | | | ACAGCCGCCAACGGTTCCTGTGGCTTACATCCAAATTCCGCAAGAGTGTGGCGCGAAGGAATTGT |
| | | | TTGGGGTGCTTCTTGAGCATTTGAAGTATCAGGTGGTTAAGGGAACGATCGCCGAAATTCGCGAT |
| | | | CGCACGATGCGGGTGCTCAAGGGTTGCTGCGTGGAGATGCTGATTATTGATGAAGCGGATCGGTT |
| | | | TAAACCTAAGACGTTTGCTGAGGTGCGCGATATTTTTGATAGGTTGGAAATTCCGGTGATTTTGGT |
| | | | AGGAACCGATCGCTTAGATGCGGTGATTAAGCGGGATGAACAGGTTTATAACCGTTTTCGGTCAA |
| | | | GTCATCGGTTTGGTAAGTIGTCGGGCGAGGAGTTTAAGCGGACGGTGGAGGTTTGGGAAAAGAG |
| | | | GGTTTTGCTGTTACCTGTGGCTTCTAATCTTTCTAGTAAGGCGATGTTGAAGACCTTGGGGGAGGC |
| | | | GACTGGGGGTTATGTGGGGCTATTGGATATGATTCTCCGAGAGGCGGCGATTCGGGCTCTGAAGA |
| | | | AGGGGTTATCAAGGATTGATTTGGAAACTCTTAAAGAAGTTGCTGCGGAGTACAAGTGA (SEQ ID |
| | | | NO: 241) |
| | | Protein | MTNQEAQAVAKELGDIPLNQEKIQAEIQRLNRKTFVQLEQVKILHDWLEGKRQSRQSGRVVGESRTG |
| | | | KTMGCDAYRLRHKPKQQPGQPPTVPVAYIQIPQECGAKELFGVLLEHLKYQVVKGTIAEIRDRTMRV |
| | | | LKGCCVEMLIIDEADRFKPKTFAEVRDIFDRLEIPVILVGTDRLDAVIKRDEQVYNRFRSSHRFGKLSGE |
| | | | EFKRTVEVWEKRVLLLPVASNLSSKAMLKTLGEATGGYVGLLDMILREAAIRALKKGLSRIDLETLKE |
| | | | VAAEYK (SEQ ID NO: 242) |
| | TniQ | DNA | ATGGAAGCGATCGATATCCAGCCTTGGCTGTTTCGGGTGGAACCGTTGGAGGGAGAGAGTTTGAG |
| | | | CCATTTTTTGGGGCGGTTTCGACGGGCGAATAAGTTAACGCCGAATGGGTTGGGTAAGATGGCGG |
| | | | GGTTGGGAGGCGCGATCGCCCGTTGGGAAAAGTTTCGCTTTAATCCGCCTCCTTCTCCTCAGCAGT |
| | | | TGGATGCGTTGGCGGCGGTGGTGGGAGTTGAAAAGGAACAGTTACAGGAAATGTTACCGCCTCCT |
| | | | GGGGTGGGGATGAAGTTAGAGCCGATTCGGTTGTGTGGGGCGTGTTATGCCCAGTCGCCTTGTCA |
| | | | TCAGATTGAATGGCAGTTTAAGACGACACAAGGATGCGATCGGCACAAATTACGCTTGCTGTCGG |
| | | | AGTGTCCCAACTGCGGGGCGAGGTTTAAGATTCCGGCGTTGTGGGTGGATGGGTGGTGTTCTCGG |
| | | | TGTTTTTTGTCCTTTAAAGATATAGTAAAGTGGCAGAAAACTACTTTGCCATAA (SEQ ID NO: 243) |
| | | Protein | MEAIDIQPWLFRVEPLEGESLSHFLGRFRRANKLTPNGLGKMAGLGGAIARWEKFRFNPPPSPQQLDA |
| | | | LAAVVGVEKEQLQEMLPPPGVGMKLEPIRLCGACYAQSPCHQIEWQFKTTQGCDRHKLRLLSECPNC |
| | | | GARFKIPALWVDGWCSRCFLSFKDIVKWQKTTLP (SEQ ID NO: 244) |
| OFC | TnsB | DNA | ATGTTGAATCAGCAGCCAACAGATCCGGTAGCACCGGAGAGTAATGAAATAATTGCCACGCTTTC |
| D01000028.1 | | | AGCCAATGCGAAATTTCGGCTAGAAGTGCTACAGACGCTGGTTGTTCCGGGCAATCGGACAACCT |
| | | | ATGGAGAACGATTGCGAGAAGCAGCCCAAAAACTTGGGAAATCGATCCGGACTGTGCAGCGGAT |
| | | | GGTCAAGGACTGGGAACGAAATGGCTTGTCAGCCTTGGAAGGTGGTGCAAGAGCGGATAAAGGG |
| | | | CAACCACGCATTGGGCAAGAGTGGCAAGATTTCATTATCAAGACCTACCAGAGTGGCACTAAAG |
| | | | ACAGCAAGCGTATTACTCCGGCACAGGTGGCGGTTCGGGTTAAGGTACGGGCACAGCAATTGGG |
| | | | CGTAGAGAAATATCCCAGCCACATGACGGTTTATCGGATTCTGGAGCCGCTGATCGCGAAAAAGG |
| | | | AGCAGCAGAATAATAAGCGAAGTATTGGCTGGCGAGGCTCGCGGCTTTCGCTCTCAACCAGGGCA |
| | | | GGACAGGATTTAGCAATTGAGTATAGCAATCATGTTTGGCAATGTGACCACACTCGTGCGGACGT |
| | | | TTTGCTGGTTGACCAGCATGGGGAAATGTTGGGACGGCCTTGGCTGACGACGGTAATCGATACCT |
| | | | ATTCCCGGTGCATTGTTGGGATTAATTTGGGGTTTGATGCACCCAGTTCTCAGCTTGTGGCGTTGG |
| | | | CCTTGCGTCATGCAATGTTGCCGAAACGCTATGGGAGCGAATATGGGCTGAATTGTGAGTGGGGA |
| | | | ACCTCCGGGAAGCCGGAGCATTTCTTTACGGATGGTGGCAAGGATTTTCGATCGGATCATATTCA |
| | | | GCAAGTCTCAATGCAGATTGGGTTTGTTTGCCACTTGCGCGATCGGCCTTCGGAAGGAGGCGTAG |
| | | | TTGAGCGGCCATTTGGCACGTTGAATACTGAGTTTTTCTCACACTTGCCTGGATATACGGGGTCAA |
| | | | ATGTCCAAGATCGGCCAGAGGAAGCGGAGAAATCAGCTTGTTTGACCCTGAGAGAACTGGAGCA |
| | | | GCAACTGGTTCGGTACTTGGTGGATAACTATAACCAGCGGCTGGATGCCCGGATGAAGGATCAAA |
| | | | CGCGCTTTCAACGGTGGGAGGCGGGGTTAATTGCTAATCCCGATATTTTTACGGAGCGGGAATTG |
| | | | GATATTTGCCTGATGAAGCAAACCCGACGGACGGTTTACCGAGAGGGCTATCTACGCTTTGAGAA |
| | | | TTTGACCTATCGGGGAGAGAATCTGGCTGGCTATGCTGGTGAAACAGTGGTGCTGCGGTTTGACC |
| | | | CACGGGATATTACGACGATTTATGTTTACCGGACTGAGGGGGAGAAGGAGGTCTTTCTTACCAAT |
| | | | GCTCATGCTCAGGATTTGGAAACTGAGACGATCGCGCTTGATGAAGCGAAAGCCAGTAGCCGCA |
| | | | GGGTGCGGGAGGCGGGAAAAACCATTAGCAATCGATCGATTCTAGAGGAGGTGCGCGATCGGGA |
| | | | TGTATTTGTCGAGAAGAAGCAGAAGGGTCGGAAGGCAAGGCAAAAAGCAGAACAGGAACGCTTG |
| | | | CCCAGTCGGCCTCAACCGCAGTCGGTAGAAATTGCGGCGGTTGAACCGGACGAAATCGTCGAAA |
| | | | AGACTGGGGTGGATGAATCCTGGGTAATGCCAGAGGTTATGGATTATGACCAACTACATGATGAT |
| | | | TTTGGGTGGTAA (SEQ ID NO: 245) |
| | | Protein | MLNQQPTDPVAPESNEIIATLSANAKFRLEVLQTLVVPGNRTTYGERLREAAQKLGKSIRTVQRMVKD |
| | | | WERNGLSALEGGARADKGQPRIGQEWQDFIIKTYQSGTKDSKRITPAQVAVRVKVRAQQLGVEKYPS |
| | | | HMTVYRILEPLIAKKEQQNNKRSIGWRGSRLSLSTRAGQDLAIEYSNHVWQCDHTRADVLLVDQHGE |
| | | | MLGRPWLTTVIDTYSRCIVGINLGFDAPSSQLVALALRHAMLPKRYGSEYGLNCEWGTSGKPEHFFTD |
| | | | GGKDFRSDHIQQVSMQIGFVCHLRDRPSEGGVVERPFGTLNTEFFSHLPGYTGSNVQDRPEEAEKSAC |
| | | | LTLRELEQQLVRYLVDNYNQRLDARMKDQTRFQRWEAGLIANPDIFTERELDICLMKQTRRTVYREG |
| | | | YLRFENLTYRGENLAGYAGETVVLRFDPRDITTIYVYRTEGEKEVFLTNAHAQDLETETIALDEAKASS |
| | | | RRVREAGKTISNRSILEEVRDRDVFVEKKQKGRKARQKAEQERLPSRPQPQSVEIAAVEPDEIVEKTGV |
| | | | DESWVMPEVMDYDQLHDDFGW (SEQ ID NO: 246) |
| | TnsC | DNA | ATGACGACAGTTCAAGCAGCACAGACCGTTGCGGATCACTTGGGGCCAGTGGCATTGGCCAGTGA |
| | | | GAAGGTTCAAGCCGAGATAGCTCGGTTAAACCGCAAGAGTTTTGTCGAATTGGCTCAAGTGCAAA |
| | | | GCCTGCATGGTTGGCTGGAAAGTAAACGGCAGTCGAAGCAATGCTGTCGTGTCGTGGGGGAATCA |
| | | | CGGACGGGGAAAACCTTGGCTTGTGATGCTTATCGGCTACGCCATAGGCCGAGCCAACAACCAGG |
| | | | AAAGCCGCCGATCGTACCCGTGATTTACATTCAAGTGCCGCAGGAATGTGGATCGAAGGAACTGT |
| | | | TCCAAATCATCATCGAGCATCTTAAGTATCAGATGGTGAAGGGGACGGTGGCAGAAATTCGGGA |
| | | | ACGGACAATGCGAGCGCTGAAGGGTTGTGGGGTAGAGATGCTGATCATTGATGAGGCCGATCGG |
| | | | TTGAAGCCCAAGACTTTTGCGGATGTGCGGGATATTTTTGACAAACTGGAGATTGCGGTGGTGCT |
| | | | GGTGGGTACCGATCGGCTGGATGTGGTGGTGAAGCGGGATGAGCAGGTTTACAACCGTTTTCGGG |
| | | | CCTGTCATCGGTTTGGGAAGTTGGCGGGGGAGGAGTTTCAACGGACGATCGAGGTGTGGGAAAA |
| | | | GCAGGTGCTGAAGTTACCTGTGGCCTCGAATTTGACGAGTAAGTCGATGATGAAGGTGATTGGAG |
| | | | AGGCGACGGCAGGGTATATCGGGTTGATGGATATGATTTTGCGGGAGGCGGCGATTCGATCGTTG |
| | | | AAGAAGGGATTGCCGAAGATTGATTTGGAGACGCTGAAGGAAGTGGCGGCGGAGTATCGATGA |
| | | | (SEQ ID NO: 247) |
| | | Protein | MTTVQAAQTVADHLGPVALASEKVQAEIARLNRKSFVELAQVQSLHGWLESKRQSKQCCRVVGESR |
| | | | TGKTLACDAYRLRHRPSQQPGKPPIVPVIYIQVPQECGSKELFQIIIEHLKYQMVKGTVAEIRERTMRAL |
| | | | KGCGVEMLIIDEADRLKPKTFADVRDIFDKLEIAVVLVGTDRLDVVVKRDEQVYNRFRACHRFGKLA |
| | | | GEEFQRTIEVWEKQVLKLPVASNLTSKSMMKVIGEATAGYIGLMDMILREAAIRSLKKGLPKIDLETL |
| | | | KEVAAEYR (SEQ ID NO: 248) |
| | TniQ | DNA | ATGATGGACGATCTAGAGATTCAGCCTTGGTTTTTCCAAGTGGAACCTTATGAGGGGGAGAGTAT |
| | | | TAGCCATTTTTTGGGGCGGTTTCGGCGGGCAAATGAGCTAACTCCGGGTGGGTTGGGGCAGATGG |
| | | | CGGGGTTGGGGGCGGCGATCGGGCGGTGGGAGAAGTTTCGGTTTAATCCTCGTCCGACGGGGGA |
| | | | GCAGTTGGAGAAACTGGCGGTGGTGGTTGGGGTGCCGACGGAGCGGCTATGGCAGATGTTGCCG |
| | | | GGGGATGGGGTGGGGATGAAGATGGAGCCGATTCGGTTGTGTGGGGCTTGCTATGGGGAGGTAG |
| | | | CTTGTCATCGGATTGAGTGGCAGCTTAAGGAGACAAGTGGGTGCGATCGCCACCAATTGCGGTTG |
| | | | CTATCGGAATGCCCTACTTGTGGAGCAAGGTTTTCAGTTCCAGCTTCGTGGGTTGAGGGTAATTGT |
| | | | AAGCGGTGCTTTACTCCTTTTTCAGCAATGGCTATGCATCAGAAATCGATTGCTTGA (SEQ ID NO: |
| | | | 249) |
| | | Protein | MMDDLEIQPWFFQVEPYEGESISHFLGRFRRANELTPGGLGQMAGLGAAIGRWEKFRFNPRPTGEQLE |
| | | | KLAVVVGVPTERLWQMLPGDGVGMKMEPIRLCGACYGEVACHRIEWQLKETSGCDRHQLRLLSECP |
| | | | TCGARFSVPASWVEGNCKRCFTPFSAMAMHQKSIA (SEQ ID NO: 250) |
| OFD | TnsB | DNA | ATGGATGAAAGCCAAATTGCATTAGAAGCTGATTTGCAGGGATTCGATGAGGTTTTGTTGAGCGA |
| P01000089.1 | | | TCGAGCCTTTGACACCGATCCATCCCAAATTTTAATTGAATCGTCAGATCCACAGAAGTTACGCTT |
| | | | TCGTCTAATTGAGTGGCTAGCGGAGGCTCCCAATCGGAAAGTGAAGGCGGAACGGAAAAAGAAG |
| | | | ATCGCTGAAACGCTCGATATATCAACTCGTCAGGTAGAGCGGTTGCTCGATCGATACAATGATGA |
| | | | GCAGTTACATGAAACTGCCGGAATCGATCGTTCAGACAAAGGGCAACATCGGATTGGCGACTATT |
| | | | GGCCCGAATATATCCGCAGTGTCTATGAACAAAGTGTCAAAGATAAACACCCGCTCACTCCAGCG |
| | | | AATATTGTGCGAGAGGTTCACCGTCACGCATTAATCGATCTTCGGCATGAAGAAGGTGACTATCC |
| | | | TCATCAAGCAACTATCTACCGGATTCTAAAACCTCTCATCGAACAGCAGAAGCGAAAAAGTAAGA |
| | | | TTCGCAATCCAGGATCGGGATCTTGGATGAGTGTTGAAACACGGGACGGAAAGTTGCTCAAGGCG |
| | | | GATTTTAGCAATCAGATCGTTCAGTGCGACCATACAAAGTTAGATGTTCGGATCGTCGATGAGGA |
| | | | TGGCAAGCTTTTAAACTGGCGACCTTGGCTTACCACTGTTGTCGATACTTTCTCAAGCTGTCTGAT |
| | | | TGGCTATCATTTGTGGCATAAACAGCCAGGATCTCATGAAGTTGCACTTACCCTCAGACATGCAG |
| | | | CATTACCCAAGAATTATCCGCCAGAATATGAGCTTCAGAAGTCGTGGGACATCTGTGGATTGCCA |
| | | | CTCCAGTATTTTTTTACTGATGGCGGCAGAGATTTAGCTAAATCGAAACTCATCAAGGCTTTTGGC |
| | | | AATAAGTTCGGTTTTCAGTGCGAACTGCGAGATCGACCGATTCAAGGTGGGATTGTTGAGCGACT |
| | | | ATTCGGGACAATTAATACACAGGTTTTACAACCTCTGGCTGGCTACATATCACCAGAAGAAGATG |
| | | | GCGCAAAACGGGCAGAAAAGGAGGCTTGTCTAACTATTGAAGATGTTGACAAGATTCTAGCCGCT |
| | | | TACTTCTGTGACGACTACAATCATCAGCCATATCCTAAAGATCCCCGTGATACCCGCTATGAGAA |
| | | | ATGGTTAAGAGGAATGGGGGGCAAGTTGCCAGAAACACTGGATGAGCGAGATCTAGATATTCTC |
| | | | CTTACTAAGGAAAAACAAAAACTCGTTCAGGAGTATGGATCTATTTATTTTGAAACTCTAACATA |
| | | | CCAATGTAAAGAATTGGAGCCATTTAAAGGTCAATATGTCACCGTAACCTACGATCCCGACCATG |
| | | | TTCTGACGTTATATATTTACACTCAACCTATTGGCGAGCGAGAGAGTGAATTTATCTGCTGTGTTC |
| | | | ATGCCAATAACATGGACATTCAAGATTTGAGCCTGTATGAGCTGAAACAATTTAACAAGGAGAAA |
| | | | AGTACAACGAAACGAGAGCACTCAAATTATAGTGCGGCTATAGCTTTGGATAAACGACAAAAGC |
| | | | TTGTAGCAGAAAGGAAGCAGGGCAAGAAGGAGCGTCAACAGGCAGGGCAGAAGGAACTGCGAG |
| | | | GAAAAAGTAAGCAGAACTCGAATGTGGTGGAAATGCGGAAGGTTCGAGCTGGTAAATCTGCTAG |
| | | | AAACAACGAACCGATGGAACTCTTGCCAGAAAGGGTTACTCCCGAACAGATGAAGCCTCAGCCT |
| | | | CTGGTAGCGTTATCTCCTGCACCCATTCTTGAGCCTGATGCTTCTACACCTCGAACGACCGAACGG |
| | | | CATCGACTTGTTATTGCTAAAAATCAAAAAATGAAGAGGGACTGGTAA (SEQ ID NO: 251) |
| | | Protein | MDESQIALEADLQGFDEVLLSDRAFDTDPSQILIESSDPQKLRFRLIEWLAEAPNRKVKAERKKKIAET |
| | | | LDISTRQVERLLDRYNDEQLHETAGIDRSDKGQHRIGDYWPEYIRSVYEQSVKDKHPLTPANIVREVH |
| | | | RHALIDLRHEEGDYPHQATIYRILKPLIEQQKRKSKIRNPGSGSWMSVETRDGKLLKADFSNQIVQCDH |
| | | | TKLDVRIVDEDGKLLNWRPWLTTVVDTFSSCLIGYHLWHKQPGSHEVALTLRHAALPKNYPPEYELQ |
| | | | KSWDICGLPLQYFFTDGGRDLAKSKLIKAFGNKFGFQCELRDRPIQGGIVERLFGTINTQVLQPLAGYIS |
| | | | PEEDGAKRAEKEACLTIEDVDKILAAYFCDDYNHQPYPKDPRDTRYEKWLRGMGGKLPETLDERDLD |
| | | | ILLTKEKQKLVQEYGSIYFETLTYQCKELEPFKGQYVTVTYDPDHVLTLYIYTQPIGERESEFICCVHAN |
| | | | NMDIQDLSLYELKQFNKEKSTTKREHSNYSAAIALDKRQKLVAERKQGKKERQQAGQKELRGKSKQ |
| | | | NSNVVEMRKVRAGKSARNNEPMELLPERVTPEQMKPQPLVALSPAPILEPDASTPRTTERHRLVIAKN |
| | | | QKMKRDW (SEQ ID NO: 252) |
| | TnsC | DNA | ATGGCACAATCAGAACTGGCAATTCACGTTCCTGTTGAAGTTTTAACTACCCAGTTAGATATGACT |
| | | | GACTTGCTGGCTAAAGCAGCAACGATCGAGGAGCTATTCAAGACGGCATTTATTCCAACCGATCG |
| | | | ACATTCAGAGTATGCTCGATGGATAGATGAATTACGAATTCTCAAACATTGTGGTCGAGCGATCG |
| | | | GGCCAAGAGATGTGGGGAAAAGTCGTTCGTCAGTAAATTATCGAGAGGAGGATATAAAGCGGGT |
| | | | TTCATGTGTTAAGGCATGGTCAAATTCAAGCTCTAAGCGGTTGTTTTCACAAATCCTCAAAGACAT |
| | | | TAACCATGCAGCTTGGAGAGGTAAGCCAAAAGATTTACAAGCTAGATTAGCTGGCTGTTTAGAAC |
| | | | TATTTGGGATTGAGCTGCTGTTAATTGATAATGCTGATAATTTACAACGGGAGGCTTTGATTGACC |
| | | | TAAAGCAGCTTCATGAAGAATCTGGAGTGCCGATCGTCTTAATTGGTGGGCAGGATCTTGACAAC |
| | | | ACCCTGGTAAATTTCGATTTACTGACTTGTTTTCCGACATTATTTGAGTTTGATGCTCTAGGTGAA |
| | | | GAGGACTTAAAGAAAACATTGGAGACGATCGAATTAGATATTCTGGCACTTCCCCAAGCATCTAA |
| | | | TTTGTCGGAAGGAAGGCTATTTGAAATTTTGCGAGATAGTTCTCAAACTCGAATTGGTATTTTGAT |
| | | | TAAAATCCTATCAAAGACTGTTCTACATTCGTTGAAAAAAGGTCATGGAAAGGTTGAGGAAGAGA |
| | | | TTCTGAGAAATATTGCTAATCGGTATGGGCGACGGTACGTTCCGTTGGAAGCTAGAAATAAGCCG |
| | | | CAGTCGATCGAGGGTTGA (SEQ ID NO: 253) |
| | | Protein | MAQSELAIHVPVEVLTTQLDMTDLLAKAATIEELFKTAFIPTDRHSEYARWIDELRILKHCGRAIGPRD |
| | | | VGKSRSSVNYREEDIKRVSCVKAWSNSSSKRLFSQILKDINHAAWRGKPKDLQARLAGCLELFGIELLL |
| | | | IDNADNLQREALIDLKQLHEESGVPIVLIGGQDLDNTLVNFDLLTCFPTLFEFDALGEEDLKKTLETIE |
| | | | LDILALPQASNLSEGRLFEILRDSSQTRIGILIKILSKTVLHSLKKGHGKVEEEILRNIANRYGRRYVP |
| | | | LEARNKPQSIEG (SEQ ID NO: 254) |
| | TniQ | DNA | ATGGGAGAGTCTGCTTTGAGTCAGCTTGACGATCGAGTGCCCTGGCTAGGTTATGTGGAACCATT |
| | | | TGAGCATGAAAGTATCAGCCATTATCTCGGACGGTTGCGGCGATTTAAGGCGAATAGTCTGCCGT |
| | | | CGGCTTATGCGCTAGGGCAGGCGGCAGGGATTGGGGGCATAACGGTTAGATGGGAGAAGCTGTA |
| | | | TTTCAATCCATTTCCGACTGATGAGGAGTTGGGATCGATCGCCAGTTTAATCGGTTTAGATTTGTC |
| | | | GCGGTTTCAGGATATGTTGCCGAGCCGAGAAATCACGTTTCAACCTCGCCCGATTCGGCTCTGTGT |
| | | | GGCTTGTTATGGAGAAAGTCCAGGTCATCGGATGGAATGGCAGTACAAGGATGTTGTGGCGGTTT |
| | | | GTCAGCGTCACAGTCTGCGACTATTGGAGCGATGCCCACAATGCAAGAAGCCGTTTGAGATTCCA |
| | | | GCGTTATGGACTGCCGATCGATGCCATCACTGTGGGATGCGGTTTACGTCGATGGTGAAGTATCA |
| | | | GGAGAGAATCAATAAAGCTATCTGA (SEQ ID NO: 255) |
| | | Protein | MGESALSQLDDRVPWLGYVEPFEHESISHYLGRLRRFKANSLPSAYALGQAAGIGGITVRWEKLYFNP |
| | | | FPTDEELGSIASLIGLDLSRFQDMLPSREITFQPRPIRLCVACYGESPGHRMEWQYKDVVAVCQRHSLR |
| | | | LLERCPQCKKPFEIPALWTADRCHHCGMRFTSMVKYQERINKAI (SEQ ID NO: 256) |
| OGV | Tn | DNA | ATGTACCCGCACAATAGCGAATTACTATTTTGTCTAAGTCCCACTATGGATGAAATACCTATCTTC |
| Q01000026.1 | sB | | AATCAAGACAAAGAATCTCTGCCATTTGATGACAACAATGATTTGGCAGAAATTCAGAATGATGA |
| | | | GTCAGAAGAAACAAACGTAATTATTACCGAACTTTCGGCTGAAGCAAAACTCAAGATGGAAGTG |
| | | | ATTCAAGGTCTACTTGAACCATGCGATCGCAAAACCTATGGTCAGAAATTAAGAGTAGCAGCAGA |
| | | | AAAACTGGGCAAGACTGTCAGAACTGTCCAGCGTTTAGTTAAAAAGTATCAACAAGACGGTCTAT |
| | | | CCGCAATTGTTGACACTGAGAGAAATGATAAAGGCAGTTATCGGATAGACCCTGAGTGGCAAAA |
| | | | ATTTATTATCAGCACTTTTAAAGAAGGTAATAAGGGTAGTAAAAAAATGACTCCGGCTCAAGTAG |
| | | | CAATCAGGGTACAAGTCAGAGCAGGACAGCTAGGTTTAGAAGATTACCCCAGTCACATGACAGTT |
| | | | TACAGAGTTCTTAACCCTATTATTGAGCGGAAAGAGCAAAAACAGAAAGTACGGAATGTTGGAT |
| | | | GGCGGGGGTCACGAGTATCCCACAAAACTCGTGATGGGCAAACATTAGATGTACATCATAGTAAT |
| | | | CATGTTTGGCAGTGTGACCATACAAAACTAGATGTCATGTTGGTTGATCAATATGGTGAGCCTTTG |
| | | | TCTCGCCCTTGGTTCACCAAAATTACAGACAGTTACTCTCGTTGTATCATGGGTATTCATTTGGGC |
| | | | TTTGACGCACCAAGTTCTCAAGTGGTAGCCCTAGCATTACGCCATGCTATTTTGCCAAAGCAGTAT |
| | | | AGTGCGGAATACAAACTTCATTGTGAATGGGCAACTTATGGTGTACCTGAAAATCTTTTCACTGAT |
| | | | GGTGGTAGAGATTTTCGCTCAGACCACTTAAAACAGATTGGTTTCCAATTAGGTTTTGAGTGTCAT |
| | | | TTACGCGATCGCCCCAGTGAAGGTGGTATTGAAGAACGTAGTTTTGGCACTATCAATACAGAATT |
| | | | TCTCTCTGGTTTCTATGGCTATTTAGGCTCTAATATTCAGGAACGCCCTAAGACGGCAGAAGAAG |
| | | | AAGCTTGCTTGACTTTACGGGAACTACACCTATTGTTAGTTCGCTACATTATTGACAACTATAATC |
| | | | AGCGTCTTGATGCACGTACAAAAGAGCAATCAAGGTTTCAAAGATGGGAAGCAGGATTACCTGCT |
| | | | CTACCCAAAATGGTGAAGGAGCGCGAATTAGATGTCTGTTTGATGAAAAAAACTCGACGCAGTAT |
| | | | TTACAAAGGCGGATATCTCAGCTTTGAAAATATTATGTATCGAGGAGACTACCTAGCAGCTTACG |
| | | | CTGGGGAAAGTATTGTACTCAGATATGATCCCAGGGATATTACAAGTGTTTGGGTTTATCGAATA |
| | | | GATAAAGGTAAGGAAGAGCTTCTTTCTGCTGCTCATGCGTTGGATTGGGAAACAGAGCAATTATC |
| | | | TTTAGAAGAGGCTAAAGCTGCTAGTCGAAAAGTGCGTTCTGTGGGTAAAACACTCAGCAATAAAT |
| | | | CCATTTTAGCAGAGATACACGATAGAGATACTTTCATCAAGCAAAAGAAAAAGACTCAGAAGGA |
| | | | ACGCAAAAAAGAAGAACAGGCTCAAGTTCATCCTGTTTATGAATCCATCAATCTCAGTGATACCG |
| | | | AACTGGTAGAAATTCCAGAAGAAACGCCTAAAACTCAAGCACCACAATCTCGAAGACCTAGAGT |
| | | | TTTCAACTATGAACAACTACGTCAAGACTATGATGAGTAG (SEQ ID NO: 257) |
| | | Protein | MYPHNSELLFCLSPTMDEIPIFNQDKESLPFDDNNDLAEIQNDESEETNVIITELSABAKLKMEVIQGLL |
| | | | EPCDRKTYGQKLRVAAEKLGKTVRTVQRLVKKYQQDGLSAIVDTERNDKGSYRIDPEWQKFIISTFKE |
| | | | GNKGSKKMTPAQVAIRVQVRAGQLGLEDYPSHMTVYRVLNPIIERKEQKQKVRNVGWRGSRVSHKT |
| | | | RDGQTLDVHHSNHVWQCDHTKLDVMLVDQYGEPLSRPWFTKITDSYSRCIMGIHLGFDAPSSQVVAL |
| | | | ALRHAILPKQYSAEYKLHCEWATYGVPENLFTDGGRDFRSDHLKQIGFQLGFECHLRDRPSEGGIEER |
| | | | SFGTINTEFLSGFYGYLGSNIQERPKTAEEEACLTLRELHLLLVRYIIDNYNQRLDARTKEQSRFQRWEA |
| | | | GLPALPKMVKERELDVCLMKKTRRSIYKGGYLSFENIMYRGDYLAAYAGESIVLRYDPRDITSVWVYR |
| | | | IDKGKEELLSAAHALDWETEQLSLEEAKAASRKVRSVGKTLSNKSILAEIHDRDTFIKQKKKTQKERKK |
| | | | EEQAQVHPVYESINLSDTELVEIPEETPKTQAPQSRRPRVFNYEQLRQDYDE (SEQ ID NO: 258) |
| | TnsC | DNA | ATGAAAGACGATTATTGGCAGAAATGGGTACAAAATTTATGGGGAGATGAACCAATTCCAGAGG |
| | | | AATTACAGCCAGAAATTGAACGTCTACTGACTCCCAGTATTGTGGAATTAGATCATATACAAAAA |
| | | | ATCCATGATTGGTTAGATGGTTTGCGTCTTTCCAAACAATGTGGTCGAATTGTTGCACCTCCACGA |
| | | | GCAGGTAAGTCGGTTTCTTGTGATGTATATAGACTATTAAATAAGCCACAAAAAAGAGGAGGTAA |
| | | | AAAAGATATTGTACCTGTTTTGTATATGCAAGTTCCAGGAGATTGCTCATCGGGTGAATTATTAGT |
| | | | TCTGATTCTGGAAAGTTTGAAATATGAGTCAACTACCGGAAAACTTACTGATATCAGAAGACGGG |
| | | | TACAAAGACTACTCAAAGAATCTAAAGTGGAAATGCTAATTATTGATGAAGCAAATTTTCTCAAG |
| | | | TTGAATACTTTTAGTGAAATTGCCCGAATTTACGACTTGCTGAGAATTTCCATTGTTCTTGTAGGT |
| | | | ACGGATGGTTTGGATAATCTAATTAAAAAAGAGCCTTACATTCATGATCGATTTATTGAATGTTAT |
| | | | AGATTACCATTAGTATCAGAGAAAAGATTTTCTGAATTAGTAAAAATTTGGGAAGAAGAGGTTTT |
| | | | ACGTTTACCTCTCCCTTCTAATCTCACAAGAAATGAAACTTTATTACCTTTGTATCAAAAAACCAG |
| | | | TGGCAAAATTGGTTTAGTAGATCGGGTATTGAGAAGAGCTTCAATTTTAGCCTTGAGAAAAGGAT |
| | | | TGAAGAAAATAGATAAAGAGACTTTAACTGAAGTTTTAGATTGGTTTGAATAA (SEQ ID NO: 259) |
| | | Protein | MKDDYWQKWVQNLWGDEPIPEELQPEIERLLTPSIVELDHIQKIHDWLDGLRLSKQCGRIVAPPRAGK |
| | | | SVSCDVYRLLNKPQKRGGKKDIVPVLYMQVPGDCSSGELLVLILESLKYESTTGKLTDIRRRVQRLLK |
| | | | ESKVEMLIIDEANFLKLNTFSEIARIYDLLRISIVLVGTDGLDNLIKKEPYIHDRFIECYRLPLVSEKR |
| | | | FSELVKIWEEEVLRLPLPSNLTRNETLLPLYQKTSGKIGLVDRVLRRASILALRKGLKKIDKETLTEVL |
| | | | DWFE (SEQ ID NO: 260) |
| | TniQ | DNA | ATGGAAATTGCTGCGGATGAACCTCGTTTTTTTGAGGTAGAACCCCTGGATGGAGAAAGTTTAAG |
| | | | TCATTTCTTAGGTCGTTTTCGCCGAGAAAATTATTTAACCTCTACCCAGTTGGGTAAATTGACTGG |
| | | | ACTCGGTGCAGTTATTTTACGTTGGGAAAAGTTGTATTTCAATCCTTTTCCTACTCTACAAGAGTT |
| | | | GGAGGCTTTGTCCTCTGTGGTGGGAGTTAATGTGGATAGGTTAATGGAGATGCTCCCATCTCAGG |
| | | | GAATGACGATGAAGCCTAGACCAATTAGGTTATGTGGGGCTTGCTATGCAGAATCTCCTTGTCAT |
| | | | CGGGTTGATTGGCAGTTAAAGGATAAAATCAGGTGTGATGGCTACACTGGACGAAGACATCCCCA |
| | | | TAATTTACGCTTGTTAACGAAGTGTACTAACTGTGAAACACCTTTTCCTATTCCCGCAGATTGGGT |
| | | | ACAAGGTGAATGTCCTCACTGTTTCCTGCCTTTTGTAACAATGGCGAAGCGTCAGAAGCCTAGCT |
| | | | AA (SEQ ID NO: 261) |
| | | Protein | MEIAADEPRFFEVEPLDGESLSHFLGRFRRENYLTSTQLGKLTGLGAVILRWEKLYFNPFPTLQELEAL |
| | | | SSVVGVNVDRLMEMLPSQGMTMKPRPIRLCGACYAESPCHRVDWQLKDKIRCDGYTGRRHPHNLRL |
| | | | LTKCTNCETPFPIPADWVQGECPHCFLPFVTMAKRQKPS (SEQ ID NO: 262) |
| CP031941.1 | TnsB | DNA | ATGCTGGACGATCATACCAATAGCGAGCAAGAGGCAGAAAAGGATGAGATCGTGACGGAACTCT |
| | | | CAGCAGCTGATAGGCATTTGCTGGATATGATTCAGCAACTACTAGAACCGTGCGATCGCATCACC |
| | | | TATGGAGAAAGACAAAGGGAGGTCGCAGCCAAACTAGGCAAGTCTGTGCGAACGGTACGGCGAC |
| | | | TGGTAAAAAAATGGGAAGAGGAAGGTTTAGCTGCACTTCAAACTACGACACGGGCTGACAAAGG |
| | | | CAAACATCGAATAGACACTGATTGGCAACAGTTCATCATCAAAACTTATAAGGAAGGCAATAAA |
| | | | GGTAGTAAGCGAATTACTCCCCAACAAGTGGCAATCAGAGTACAAGCAAGGGCGGCTGAATTAG |
| | | | GACAAAAAAAATATCCCAGCTATAGGACTGTGTATCGAGTTCTACAACCCATTATTGAGCAGCAA |
| | | | GAACAAAAAGCAGGTGTTAGAAGTCGAGGTTGGCATGGTTCTCGATTATCAGTTAAAACCCGCGA |
| | | | TGGTAAAGACTTATCAGTAGAATATAGCAACCATGTTTGGCAGTGTGACCATACTCGTGTAGACC |
| | | | TATTGCTGGTAGATCAGCATGGTGAACTTTTGGCTCGTCCTTGGCTGACAACTGTTGTTGATACTT |
| | | | ACTCCCGTTGCATCATGGGGATAAACTTAGGCTTTGATCCTCCGAGTTCTCAGGTAGTAGCATTAG |
| | | | CACTGCGCCATGCAATTTTGCCAAAGCAGTATGGGTCAGAATATGGACTTCATGAAGAATGGGGA |
| | | | ACCTACGGGAAACCAGAACATTTTTATACCGATGGTGGTAAAGATTTTCGCTCAAACCATTTGCA |
| | | | ACAGATAGGTGTGCAATTGGGATTTGTTTGTCATTTACGCGATCGCCCCAGTGAAGGTGGTATTGT |
| | | | TGAGCGTCCTTTTGGCACTTTTAATACCGACTTCTTTTCTAATATGCCGGGATACACAGGATCAAA |
| | | | TGTGCAGGAACGTCCAGAGCAAGCTGAGAAGGAGGCTTGTCTGACTTTACGGGAGTTGGAACAT |
| | | | AGGTTTGTACGCTACATCGTGGATAAATATAACCAGCGTCCTGATGCGCGTCTTGGCGATCAAAC |
| | | | TCGCTATCAACGATGGGAAGCAGGGTTAATTGCTTCTCCTAATGTAATTTCAGAAGAGGAGTTAC |
| | | | GTATTTGCCTGATGAAGCAAACTCGACGCTCTATTTATAGAGGTGGATATCTGCAATTTGAAAATC |
| | | | TGACGTATCGGGGAGAAAATITGGCAGGTTATGCAGGTGAAAGCGTTGTACTGCGCTATGACCCC |
| | | | AAAGACATTACAACTGTGTTGGTTTACCGCCAAAGTGGTAATAAAGAAGAGTTTTTAGCTAGGGC |
| | | | ATTTGCTCAGGAGTTGGAGACTGAGCAATTATCTTTGGATGAGGCTAAAGCTAGTAGTCGTAAGA |
| | | | TTCGGCAAGCAGGGAAGATGATTAGCAATCGCTCAATGTTGGCAGAGGTACGCGATCGCGAAAC |
| | | | TTTCCTGACCCAAAAGAAAACCAAAAAGGAACGTCAAAAAGCGGAACAGGCTGTAGTACAAAAA |
| | | | GCTAAACAACCATTGATAGTTGAACCAGAAGAAATTGAAGTGGCATTGTTTGATAGTGAGCCAGA |
| | | | ATACCAGATGCCAGAGGCCTTTGATTACGAACAAATGCGTGAAGATTACGGGTGGTAA (SEQ ID |
| | | | NO: 263) |
| | | Protein | MLDDHTNSEQEAEKDEIVTELSAADRHLLDMIQQLLEPCDRITYGERQREVAAKLGKSVRTVRRLVK |
| | | | KWEEEGLAALQTTTRADKGKHRIDTDWQQFIIKTYKEGNKGSKRITPQQVAIRVQARAAELGQKKYP |
| | | | SYRTVYRVLQPIIEQQEQKAGVRSRGWHGSRLSVKTRDGKDLSVEYSNHVWQCDHTRVDLLLVDQH |
| | | | GELLARPWLTTVVDTYSRCIMGINLGFDPPSSQVVALALRHAILPKQYGSEYGLHEEWGTYGKPEHFY |
| | | | TDGGKDFRSNHLQQIGVQLGFVCHLRDRPSEGGIVERPFGTFNTDFFSNMPGYTGSNVQERPEQAEKE |
| | | | ACLTLRELEHRFVRYIVDKYNQRPDARLGDQTRYQRWEAGLIASPNVISEEELRICLMKQTRRSIYRG |
| | | | GYLQFENLTYRGENLAGYAGESVVLRYDPKDITTVLVYRQSGNKEEFLARAFAQELETEQLSLDEAK |
| | | | ASSRKIRQAGKMISNRSMLAEVRDRETFLTQKKTKKERQKAEQAVVQKAKQPLIVEPEEIEVALFDSE |
| | | | PEYQMPEAFDYEQMREDYGW (SEQ ID NO: 264) |
| | TnsC | DNA | ATGACTTCAAAACAAGCTCAAGCAGTTGCCCAACAATTAGGTGAAATTTCAGCCAATGGTGAAAA |
| | | | ATTACAAGCAGAAATTCAAAGATTGAACCGGAAGACTTGTATCCTCTTGGAGCAAGTTAAAATTC |
| | | | TTAATGACTGGCTAGAAGGAAAGCGTCAAGCACGTCAGTCTGGTCGTATTGTAGGAGAGTCCAGA |
| | | | ACTGGTAAAACAATGGGTTGTGATGCCTACAGACTCCGGCATAAACCCAAGCAAGAGGTAGGAA |
| | | | AACCACCATTCGTGCCTATTGCTTTTCTCGAAGACATTCCGTCTGATTGTAGTGCTAAAGATTTGT |
| | | | TCAATGAGATTCTTAAGCATTTAAAGTATCAGATGAATAAGGGAACTGTAGCTGAGATTAGAGAA |
| | | | CGCACATTTCGAGTTCTTAAAGGTTGCGGGGTTGAGATGCTGATCATTGATGAAGCTGACCGCTT |
| | | | GAAACCCAAAACTTTTGCTGAAGTGCGAGATATTTTTGACAAGTTAGAAATTGCGGTGATTTTGG |
| | | | TGGGTACTGACAGATTAGACGCTGTAATCAAGCGAGATGAGCAAGTTTATAACCGCTTTCGTGCC |
| | | | TGTCATCGGTTTGGTAAGTTTTCTGGTGAAGATTTTAAGCGAACTGTGGAGATTTGGGAAAAGCA |
| | | | AGTTTTAAAACTGCCAGTTGCTTCTAATCTTTCCAGCAAGACGATGCTAAAAACTTTAGGTGAGGC |
| | | | AACGGGGGGTTATATTGGTTTGCTAGATATGATTTTGAGAGAATCAGCAATTCGGGCGTTAAAGA |
| | | | AAGGATTACAGAAAGTTGATTTGGAGACGCTGAAGGAAGTTACGGCGGAGTACAAGTAA (SEQ ID |
| | | | NO: 265) |
| | | Protein | MTSKQAQAVAQQLGEISANGEKLQAEIQRLNRKTCILLEQVKILNDWLEGKRQARQSGRIVGESRTGK |
| | | | TMGCDAYRLRHKPKQEVGKPPFVPIAFLEDIPSDCSAKDLFNEILKHLKYQMNKGTVAEIRERTFRVL |
| | | | KGCGVEMLIIDEADRLKPKTFAEVRDIFDKLEIAVILVGTDRLDAVIKRDEQVYNRFRACHRFGKFSGE |
| | | | DFKRTVEIWEKQVLKLPVASNLSSKTMLKTLGEATGGYIGLLDMILRESAIRALKKGLQKVDLETLKE |
| | | | VTAEYK (SEQ ID NO: 266) |
| | TniQ | DNA | ATGGAAGTTGTAGAAATTCAACCTTGGCTGTTTCAAATAGAACCTTTACAGGGAGAAAGTTTGAG |
| | | | TCACTTTTTAGGGCGTTTTCGACGGGCAAATGATITAACGCCTACTGGATTAGGTAAAGCCACAA |
| | | | AACTTGGGGGTGCGATCGCCCGATGGGAAAAATTTCGGTTTAATCCCCCACCGTCTCGCCAGCAA |
| | | | TTAGAGGCATTGGCTAAGGTTGTAGAGGTTGATGCTGATAGGCTAGCGCAGATGTTACCGCCTGC |
| | | | TGGGGTGGAGATGAAGCTTGAGCCGATTCGGTTATGTGCTGCTTGTTATGTTGAGTCAGCTTATCA |
| | | | TAAGATTGAATGGCAGTTGAAGATAACGCAAGGGTGCGATCGCCACCAATTAATTTTGTTGTCAG |
| | | | AATGTCCAAACTGTGGGGCAAGATTTAAGGTTCCAGCAGTGTGGGCGGATGGTTGGTGTCAACGG |
| | | | TGTTTTCTGAGTTTTGCCGAGATGGTAAAGTATCAAAAGTCTTATCGATGA (SEQ ID NO: 267) |
| | | Protein | MEVVEIQPWLFQIEPLQGESLSHFLGRFRRANDLTPTGLGKATKLGGAIARWEKFRFNPPPSRQQLEAL |
| | | | AKVVEVDADRLAQMLPPAGVEMKLEPIRLCAACYVESAYHKIEWQLKITQGCDRHQLILLSECPNCG |
| | | | ARFKVPAVWADGWCQRCFLSFAEMVKYQKSYR (SEQ ID NO: 268) |
| QVF | TnsB | DNA | ATGATTCAAGACTTGCAACAGCCTTTGATATTAGACGAAAACAACAATCATCTTAATATTCAGCT |
| W01000007.1 | | | AGATGAAAAGCCTGTAAAACCTCAAAGACTACCCTCTGACGAATTGCTTACTGACAAAGTAAACC |
| | | | GCAGGATAGAGGTGCTTCAAAGCCTTATCGAGCCATGCGATCGCAAAACCTACGGTATTAAAAAG |
| | | | CGGGAGGCTGCGCGAAAACTGGGTGTATCGCTGCGTCAGGTAGAACGCTTGCTTCAGAAGTGGCG |
| | | | AGAACATGGGTTAGTTGGACTAACTGCAACGCGATCAGATAAAGGAAAGTACCGCCTTGAGCAG |
| | | | GATTGGGTAGACTTTATCATCAATACTTATACCAACGGTAACAAGGGCAGCAAGCGGATGACTCG |
| | | | GCATCAAGTATTTATGCGGGTCAAAGGAAGAGCTAAGCAACTCGCGCTGAAAAAAGGTGAATAC |
| | | | CCAAGTCACCAGTCGGTTTATCGAATTCTCGACCAACACATCGAGCAGAAAGACAGAAAACGGA |
| | | | AAGCAAGAAGCCCAGGCTACTCAGGAGAGCGGTTGACACACATGACTCGTGATGGGCGAGAGTT |
| | | | GGAGGTCGAGGGTAGCAATGACGTATGGCAGTGCGATCATACTCGCTTAGATATCAGGCTTGTTG |
| | | | ACGAGTATGGCGTTCTGGATCGCCCTTGGCTAACGATAATCATCGATTCCTATTCCCGTTGCGTGA |
| | | | TGGGATTTTATTTAGGATTCGATCACCCTAGCTCTCAAATTGATGCCTTAGCTTTGCGTCATGCAA |
| | | | TCCTACCTAAGTCTTATGGTTCTGGATATCAACTTCGTCACGACTGGGGGACATATGGTAAACCCA |
| | | | ATCACTTTTATACTGACGGCGGTAAGGACTTTACTTCAATTCACATTACAGAGCAAGTTGCCGTTC |
| | | | AAATAGGTTTCAATTGCTCTTTGAGAAGACGACCATCAGATGGTGGAATTGTCGAGCGTTTTTTTA |
| | | | GGACGCTTAACGACCAAGTATTGCGTGATTTACCAGGCTACACGGGGTCAAACGTGCAACAACGC |
| | | | CCAGCAACCGTGGATAAAGATGCTCGCCTGACTCTCAAGGGTTTAGAAACGATTTTAGTGCGTTA |
| | | | CATAGTAGATGAATATAACCAGCACGTAGATGCCCGTTCTGGAAACCAGAGTCGGTTGCAGCGGT |
| | | | GGGAAGGCGGATTAATGGTAGATCCTTATCTATACGATGAATTGGACTTGGCAATTTGCTTGATG |
| | | | AAGCAAGAGCGCCGGACAGTCCAGAAATACGGACGAATAAGATTTGGAGATCGGGATTTTGCAG |
| | | | CAGAACATTTAAGAGGTCGAGCAGGAGAATTGGTTACAGTACGATTCGATCCTGATGACATCACT |
| | | | ACTCTCTTCGTCTATCAACGCAATGCAGATGGTACGGAAGAATTACTCGATTATGCTCACGCTCTA |
| | | | GATTTAGAAACTGAACGGCTTTCTTTACGAGAACTGAAAGCGAGAAATAAGAAGCGTAGAGAAA |
| | | | CAGGTGAGGAAATCAACAATTCGATTTTAGACGCGATGCTAGATCGTGACGAATTTGTGGAAAAT |
| | | | TTAGTTAAAAGAAACCGTCAGCAGCGCAAGCAGGCAGCGCAGGAACAAGTAAATCCCACACAGT |
| | | | CTGTTGCTAAGAAATTTGCTATTTCCAAACCAGAAGAAATAGAGGCAAAGTCTATGTCAGAAGCA |
| | | | GAACTGGAAGTAGAGCTACCAAGATATCAAGTTCGCTTCATGGACGACTTGTTTGAAGATGATTA |
| | | | G (SEQ ID NO: 269) |
| | | Protein | MIQDLQQPLILDENNNHLNIQLDEKPVKPQRLPSDELLTDKVNRRIEVLQSLIEPCDRKTYGIKKREAA |
| | | | RKLGVSLRQVERLLQKWREHGLVGLTATRSDKGKYRLEQDWVDFIINTYTNGNKGSKRMTRHQVFM |
| | | | RVKGRAKQLALKKGEYPSHQSVYRILDQHIEQKDRKRKARSPGYSGERLTHMTRDGRELEVEGSNDV |
| | | | WQCDHTRLDIRLVDEYGVLDRPWLTIIIDSYSRCVMGFYLGFDHPSSQIDALALRHAILPKSYGSGYQL |
| | | | RHDWGTYGKPNHFYTDGGKDFTSIHITEQVAVQIGFNCSLRRRPSDGGIVERFFRTLNDQVLRDLPGY |
| | | | TGSNVQQRPATVDKDARLTLKGLETILVRYIVDEYNQHVDARSGNQSRLQRWEGGLMVDPYLYDEL |
| | | | DLAICLMKQERRTVQKYGRIRFGDRDFAAEHLRGRAGELVTVRFDPDDITTLFVYQRNADGTEELLD |
| | | | YAHALDLETERLSLRELKARNKKRRETGEEINNSILDAMLDRDEFVENLVKRNRQQRKQAAQEQVNP |
| | | | TQSVAKKFAISKPEEIEAKSMSEAELEVELPRYQVRFMDDLFEDD (SEQ ID NO: 270) |
| | TnsC | DNA | ATGGAAGATTTAAGTCCAGAAATCCAGAAGAAAATTAAAGACTTAAGCCGCCCACCATACTTAG |
| | | | AATTAGAACGAGTCAAACACTGTCATGCATGGTTGACAGAGTTACTTATATCAAGGATGACTGGT |
| | | | CTATTGGTAGGAGAGTCTCGTTGCGGAAAAACTGTTACTTGTAAAGCTTTTACAAAGCAATACAA |
| | | | CGAGTTGAAAAAAACACAGGGACAGCGGTTTAAGCCAGTAGTTCACATTCAAATTCCTAAAGCTT |
| | | | GTGGTTCTAGAGATTTCTTTATCAAAATCCTCAAAGCTCTAAATAAGCCTACAAATGGAACCATTT |
| | | | CAGACTTACGAGAGCGAACGCTTGATAGCTTGGAAATACATCAAGTAGAAATGCTAATTATTGAC |
| | | | GAAGCCAATCACCTGAAATACGAAACGTTTTCTGATGTACGACATATTTATGACGAAAATGGATT |
| | | | GGGAATTGCCGTTCTCCTAGTCGGTACTACCAGCCGTCTCCATGCAATAGTTAAGCGCGATGAGC |
| | | | AAGTTCTCAATCGTTTTCTAGAGCAATATGAATTAGATCGCTTAGACGAGTCCCAGTTTAAGCAA |
| | | | ATCGTACAGATTTGGGAGCGAGATGTTCTGAATTTGCCAGTAGCATCCAACTTAGCAACAGGAGA |
| | | | AAATCTAAAGCTTTTGAAGCAGGGAACTCAGAAATTAATTGGTCGCCTAGATATGCTCCTTCGCA |
| | | | AAGCAGCAATTCGCTCGTTACTTAGAGGGCATCAAAACCTAGACAAAGACGTTTTGAAAGAAGTA |
| | | | ATTACTGCAACTAAGTGGTGA (SEQ ID NO: 271) |
| | | Protein | MEDLSPEIQKKIKDLSRPPYLELERVKHCHAWLTELLISRMTGLLVGESRCGKTVTCKAFTKQYNELKK |
| | | | TQGQRFKPVVHIQIPKACGSRDFFIKILKALNKPTNGTISDLRERTLDSLEIHQVEMLIIDEANHLKYE |
| | | | TFSDVRHIYDENGLGIAVLLVGTTSRLHAIVKRDEQVLNRFLEQYELDRLDESQFKQIVQIWERDVLNL |
| | | | PVASNLATGENLKLLKQGTQKLIGRLDMLLRKAAIRSLLRGHQNLDKDVLKEVITATKW (SEQ ID |
| | | | NO: 272) |
| | TniQ | DNA | ATGGCTAAAACACTTAAAGAAACAAAACTCTGGCTGACACGAGTTGAGCCATTAGAAGGGGAAA |
| | | | GTATTAGTCACTTTTTGGGTCGCTTTCGACGAGCAAAAGGAAATAAGTTCTCGACTCCGTGTGGTT |
| | | | TAGGTCAAGTGTCAGGACTTGGAGCAGTGTTGGCTCGTTGGGAAAAGTTTTATTTCAATCCCTTTC |
| | | | CAACATTTGAGGAGTTAGAGGCGCTAGCAAATGTGGTGGAAGTCGATGTTAATAGACTGCGAGA |
| | | | AATGCTGCCTTTAGCTGGTGTAGGGATGAAACATAAACCAATTAGATTATGCGGAGCTTGCTATG |
| | | | CAGAAGAACCCTATCATCTGATTGCATGGCAGTTCAAGACTACAGCAGGATGCGATCGCCACCAG |
| | | | TTGCGCTTGCTATCTAAATGCCCAATCTGTGAAAAACCGTTTCCTATTCCCGCTTTATGGATAGAA |
| | | | GGACGATGCCTGCGTTGTTTGACGTTTTTTGCCGAGATGGTCGATCGCCAAAAAGCTTACTAG |
| | | | (SEQ ID NO: 273) |
| | | Protein | MAKTLKETKLWLTRVEPLEGESISHFLGRFRRAKGNKFSTPCGLGQVSGLGAVLARWEKFYFNPFPTF |
| | | | EELEALANVVEVDVNRLREMLPLAGVGMKHKPIRLCGACYAEEPYHLIAWQFKTTAGCDRHQLRLL |
| | | | SKCPICEKPFPIPALWIEGRCLRCLTFFAEMVDRQKAY (SEQ ID NO: 274) |
| OOK | TnsB | DNA | ATGTTAAAACTATCTGAAGATAATCACGGCGACAATCAAAAGCCAGAAGTCGGCGAGATTGTGG |
| Z01000026.1 | | | CTGAAATAGCAGATGATAATAAGCAACTGCTGGAAATAATTCAGAAGTTGCTGGAGCCTTGTGAT |
| | | | CGCATTACCTACGGACAACGGCAAAGGGAAGCTGCCGCTCAGTTAGGAAAGTCAGTGCGGACAG |
| | | | TGCGACGACTAGTCAAAAAGTGGGAAGAGGAAGGTTTGGCTGCTTTATCGCAAACGACACGAGA |
| | | | AGATAAAGGCAAGCATCGAATCGAGCAAGACTGGCAAGATTTCATTATTAAAACTTATAAGGAG |
| | | | GGTAATAAAGGTAGTAAGCGCATTACCCCCAAACAAGTTGCTGTTCGCGTACAGGCAAAGGCAG |
| | | | CTGAACTAGGACAAGATCGATATCCCAGTTACAGAACGGTATATCGCGTCCTACAACCGATTATT |
| | | | GAGCGGCAAGAGCAACAGGCAAGCATTAGAAGTCGGGGCTGGCGAGGTTCGCGTTTGTCAGTCA |
| | | | AAACTCGTGATGGTAAAGACTTATCAGTGGAGTACAGCAATCACGTTTGGCAGTGCGACCACACT |
| | | | CGCGTAGACGTGCTGCTAGTAGATCGAAATGGTGAACTTTTAAGTCGCCCTTGGCTGACGACAGT |
| | | | TATAGACACTTACTCTCGTTGCATCATGGGCTTTAACTTAGGCTTTGCTGCACCGAGTTCTCAGGT |
| | | | AGTGGCACTGGCGCTGCGTCATGCCATTTTGCCAAAGCGGTATGATTCGCAATACCAACTCCATT |
| | | | GTGACGCGGGAACCTACGGTAAGCCAGAACACTTTTACACTGACGGCGGCAAAGATTTTCGCTCC |
| | | | AACCATTTGCAGCAGATTAGTGTGCAGTTAGGATTTGTTTGTCATTTACGTGATCGCCCTAGTGAA |
| | | | GGTGGCATTGTTGAGCGTCCATTTGGCACTTTGAACACAGAATTATTTTCAACTTTGCCAGGATAC |
| | | | ACGGGGTCAAACGTACAAGAACGCCCAGAGCAAGCTGAGAAAGAAGCTTGTTTAACCTTAAGGG |
| | | | AGTTAGATCGTTTGCTAGTGCGCTACATCGTGGATAAATACAACCAAAGTATTGATGCGCGTCTG |
| | | | GGAGATCAAACTCGCTTTCAGCGTTGGGAAGCTGGGTTAATTGCTGCTCCCAATCCCATTGCAGA |
| | | | GCGAGATATGGATATTTGTCTAATGAAGCAAACTCGGCGCTCAATCTATCGAGGTGGATATCTGC |
| | | | AATTTGAAAACCTGATATATCGGGGAGAAAATATGGCTGGTTATGCAGGCGAAAGTGTTGTGCTT |
| | | | AGGTATGACCCCAAAGATATCACTACCGTCTTAATTTATAGGCAAGAAGCTGGTGAAGAGGTGTT |
| | | | TTTAGCTAGAGCATTTGCTCAGGATTTGGAAACAGAACAAATGTCTCTAGATGAAGCAAAAGCTA |
| | | | GTAGCCGCAAGCTTCGAGAGACAGGAAAGACGATTAGCAATCGCTCAATTTTGGCAGAAGTGCG |
| | | | CGATCGCGAAACCTTTTTAACTCAAAAGAAAACTAAAAAGGAACGTCAAAAAGCAGAACAGGCT |
| | | | GAAGTTCAAAGGGTTAAACAACCATTGTCTATCGACCCTGAAGAAGAAATAGAAGCGGCATCGA |
| | | | TTCCAAATCAAGCAGAGCCGGAGATGCCAGACATATTTAACTACGAACAAATGCTCGAAGATTAC |
| | | | GGGTTTTAG (SEQ ID NO: 275) |
| | | Protein | MLKLSEDNHGDNQKPEVGEIVAEIADDNKQLLEIIQKLLEPCDRITYGQRQREAAAQLGKSVRTVRRL |
| | | | VKKWEEEGLAALSQTTREDKGKHRIEQDWQDFIIKTYKEGNKGSKRITPKQVAVRVQAKAAELGQD |
| | | | RYPSYRTVYRVLQPIIERQEQQASIRSRGWRGSRLSVKTRDGKDLSVEYSNHVWQCDHTRVDVLLVD |
| | | | RNGELLSRPWLTTVIDTYSRCIMGFNLGFAAPSSQVVALALRHAILPKRYDSQYQLHCDAGTYGKPEH |
| | | | FYTDGGKDFRSNHLQQISVQLGFVCHLRDRPSEGGIVERPFGTLNTELFSTLPGYTGSNVQERPEQAEK |
| | | | EACLTLRELDRLLVRYIVDKYNQSIDARLGDQTRFQRWEAGLIAAPNPIAERDMDICLMKQTRRSIYR |
| | | | GGYLQFENLIYRGENMAGYAGESVVLRYDPKDITTVLIYRQEAGEEVFLARAFAQDLETEQMSLDEA |
| | | | KASSRKLRETGKTISNRSILAEVRDRETFLTQKKTKKERQKAEQAEVQRVKQPLSIDPEEEIEAASIPN |
| | | | QAEPEMPDIFNYEQMLEDYGF (SEQ ID NO: 276) |
| | TnsC | DNA | ATGAGTTCAAAAGAAGCGCAAGCTGTTGCTCAAGAGTTGGGAGATATTCAACCCAATGATGCGA |
| | | | GATTGCAAACCGAAATTCAGCGATTGAATCGTAAAAGTTTTGTCCCTCTAGAACAAGTAAAAATT |
| | | | CTTCATGACTGGTTAGACGGAAAACGTCAAGCACGACAGGGTTGTCGAGTCGTAGGAGAGTCGC |
| | | | GCACAGGAAAAACTATTGCTTGTGATGCTTATAGATTGAGGCACAAGCCAATACAAGAACCAGG |
| | | | AAAGCCACCTATTGTACCTGTTGTTTATATCCTAGTACCTCCAGACTGCGGTTCTAAAGACTTATT |
| | | | TAGGTTAATTATTGAGTATCTGAAATATCAGATGACTAAGGGAACAGTAGCTGAAATTCGAGAGC |
| | | | GAACTCGGCGGGTTTTGAAGGGTTGTGGAGTAGAGATGTTAATCATTGATGAGGCTGACCGTTTA |
| | | | AAGCCAAATACATTTAAAGATGTGCGAGATATTGGTGAAGATTTGGGAATTACAGTTGTTTTAGT |
| | | | AGGAACTGACCGTTTAGATGCAGTGATTAAACCAGACTCCCAAGTTTACAACCGCTTTCGTGCTT |
| | | | GTCATCGGTTTGGTAATTTATCGGGTGATAGTTTTAAAAGAACAGTGGAGATTTGGGAAAAGAAG |
| | | | GTTTTGCAATTGCCTGTTGCATCAAATCTTTCTAGTAAAACAATGTTGAAGACGTTGGGCGAAGCA |
| | | | ACGGGAGGTTATATCGGTTTGCTGGATATGATTTTGAGAGAGACAGCAATTCGATGTCTGAAGAA |
| | | | AGGATTGCCCAAAATCGACTTAGAAACGCTGAAGGAAGTGGCTGGAGAATATAGGTAA (SEQ ID |
| | | | NO: 277) |
| | | Protein | MSSKEAQAVAQELGDIQPNDARLQTEIQRLNRKSFVPLEQVKILHDWLDGKRQARQGCRVVGESRTG |
| | | | KTIACDAYRLRHKPIQEPGKPPIVPVVYILVPPDCGSKDLFRLIIEYLKYQMTKGTVABIRERTRRVLKG |
| | | | CGVEMLIIDEADRLKPNTFKDVRDIGEDLGITVVLVGTDRLDAVIKPDSQVYNRFRACHRFGNLSGDS |
| | | | FKRTVEIWEKKVLQLPVASNLSSKTMLKTLGEATGGYIGLLDMILRETAIRCLKKGLPKIDLETLKEVA |
| | | | GEYR (SEQ ID NO: 278) |
| | TniQ | DNA | ATGAAAGCTACAGACATTCAGCCTTGGCTATTTCGAGTAGAACCCTATGAGGGAGAAAGTTTGAG |
| | | | TCATTTTTTGGGGAGGTTTCGACGAGCAAATGACTTAACGCCTACTGGGTTAGGTAAGGCAGTAG |
| | | | GAGTTGGGGGAGCGATCGCACGTTGGGAAAAGTTTCGTTTTAATCCACCCCCCTCGGAAATGGAG |
| | | | TTGGAGAAGTTAGCGCAGGTGGTAAAGATTGATGTGAGTAGATTAAGAGAGATGTTACCACCACC |
| | | | AGAAATTGGGATGAAGATGAATCCGATTCGCTTGTGTGGGGCGTGTTGTGGAGAAATGCTCTGTC |
| | | | ATAAGATTGAGTGGCAGTTGAAGACAACGAAGTTTTGTAGCAAGCATGGGCTAACTTTGCTGTCG |
| | | | GAATGTCCTACTTGTGGGTCGAGATTTGCGTTTCCGGCGTTGTGGAATGAGGGATGGTGTAAGCG |
| | | | GTGTTTTTTGCCGTTTGGGGAAATGGTGCAGTATCAAAAATTAGCTCAAAAGTCATAG (SEQ ID NO: |
| | | | 279) |
| | | Protein | MKATDIQPWLFRVEPYEGESLSHFLGRFRRANDLTPTGLGKAVGVGGAIARWEKFRFNPPPSEMELEK |
| | | | LAQVVKIDVSRLREMLPPPEIGMKMNPIRLCGACCGEMLCHKIEWQLKTTKFCSKHGLTLLSECPTCG |
| | | | SRFAFPALWNEGWCKRCFLPFGEMVQYQKLAQKS (SEQ ID NO: 280) |
| NKF | TnsB | DNA | ATGGCTGCTCAACCAGAGGAAAATAATCAAGTCCCTGAGTCGTTAGATTCGGATTCGCAGGAAAA |
| P01000006.1 | | | AACGCAGGAGCACCCTCCTCTCCTGCTCAACGAGATTTCACCAGAACTGCAACGAAAGATTGATC |
| | | | TGATTGATGCGGTAATGCAGGCTTCCAATAAGAAGGCTCGCCAGGAAGCGATCGCCAGGGCAGC |
| | | | CCAGGAGCTAGGGCTAACAGAGCGCACAATTCGGGGTCTAGTTCGGCGTGTCGAAAGCGGTGAA |
| | | | GGACCCGCCGTGCTTGCAGTGGGTCGTCAAGACAAAGGGCAGTTTCGCATTGCAGAACATTGGTT |
| | | | CAAGTTTATTATTGCCACCTACGAATGGGGACAGAAGCAAGGTTCCCGAATGAATAAGCATCAGG |
| | | | TTCACAGGAAGCTGGGAACATTAGCAAAGTTAGGTGAGAAGCTGCGAGACAAGAGGTATAGAAA |
| | | | GCTATTCATGGGTCATCGCAAGGCACGTGAAGACTTAGTTGCAGGCGAATACCCATCCCATGTCA |
| | | | CTGTCTATAAAGTCATTGATTTCTACCTGAAGGGAAAGCACAAGAAGGTCCGTCACCCTGGCTCT |
| | | | CCGGCAGAAGGACAAATCATTCAAACGACCGAAGGAATTTTGGAGATTACGCACAGTAATCAGA |
| | | | TTTGGCAGTGCGATCACACCAAGTTAGATATTCTGGTAGTCGATGAGAAGGGTGACACGATATTA |
| | | | GAAATTGACGACGACGGCGAAGAGGTCTGGGGACGCCCTTACTTGACTCTGATTGCAGACAGCTA |
| | | | CTCCGGGTGTGTCGTCGGCTTTCATCTTGGGCTAGAACCCGCAGGCTCCCATGAAGTGGGTCTTGC |
| | | | GCTACGCCACGCAATGCTGCCCAAACAGTATGGACCGGAGTACGAACTTGAGGAGAAGGAGATT |
| | | | GTTTTTGGGAAACCAGAGTACTGGCTAACCGATCGCGCAAAGGAGTTCAAATCCAACCATCTTCA |
| | | | ACAAATCTCAATGCAGGTCGGTTTCAAACGGCGGCTACGAGCGTTTCCTCAGGCAGGTGGCTTGA |
| | | | TCGAGACGATCTTTGACACCCTGAATAAGGAATTGTTATCGCTGTTGCCAGGCTACACCGGGTCT |
| | | | AATGTTCAAGATCGTCCTAAAGATGCAGAAAAATATGCCTGCATCACGCTTAAAGAGCTTGAGAA |
| | | | GCTTTTAGTACGGTACTTTTTCAATACTTACAACTGGCTGGACTACCCCAGAGTCGAGGGTCAAAA |
| | | | GCGACATGAACGTTGGCGTTCCATGTTGCTGTCAGAACCAGAAGTTTTAGACGAGCGGAGTCTGG |
| | | | ACGTTTGCTTGATGAAAGTTTCTCACCGTAAGGTCGAAAAGTACGGCAGCGTTGAGTTTGCCCGT |
| | | | CTGATCTATCAGGGTGACTGTTTAATTCCCTATCAGGGTGAGGAAATCTCTCTGCGATATGACGAG |
| | | | CGGAACATCACCGCGCTCCTAGCTTACACCCGCCCCGCAGGAGGACAGCCCGGTCAGTACATTGG |
| | | | CGTTGTTCGTGCGCGTGATTTGAAGCAAGACCAAATTTCGCTGGAGGAACTGCGCTGGTACAAAC |
| | | | GGAAACTGCGTAAGCGCGGTGTGAAGGTTGATCATGATTCGATCGTCGCCGAACGTATGGGACTG |
| | | | TATGAATTTATTGATGAGAAGCGGAAGTCCAAGCGACAGCGCCGCAAGCAGGCAAACCAGGAGC |
| | | | ATCAGCAGCAAACGAACGCCTCCACAGTGGTTGAGCTTTTCCCTCAGAACCAGTCGGTTGAGACG |
| | | | CCTCCAGATTCTCAACCCGACGCCGAAGCCTTTGTCAGCGAGTCCCAAACTGAGGACAGGACGAA |
| | | | CCCTCCTCCACCATCGCAGTCAGTTCCTGAGCCATTGCCCCCGGTTGACGCTCCAGACAGTACAGT |
| | | | TGCGGACCTGGTGGGGGCTGAAGATGCCTCCGTGGTGATTGTGGACGAGGTGTCAACGCCTGACG |
| | | | AATCCTCTGATGACTCCTCTTTGTCTAATACTGTAGACTTTTCTCATGAGCCAGTCGTTGCTTACGA |
| | | | TTGGGACCAACTTCTAGCAGATAACTGGTAA (SEQ ID NO: 281) |
| | | Protein | MAAQPEENNQVPESLDSDSQEKTQEHPPLLLNEISPELQRKIDLIDAVMQASNKKARQEAIARAAQEL |
| | | | GLTERTIRGLVRRVESGEGPAVLAVGRQDKGQFRIAEHWFKFIIATYEWGQKQGSRMNKHQVHRKLG |
| | | | TLAKLGEKLRDKRYRKLFMGHRKAREDLVAGEYPSHVTVYKVIDFYLKGKHKKVRHPGSPAEGQIIQ |
| | | | TTEGILEITHSNQIWQCDHTKLDILVVDEKGDTILEIDDDGEEVWGRPYLTLIADSYSGCVVGFHLGLE |
| | | | PAGSHEVGLALRHAMLPKQYGPEYELEEKEIVFGKPEYWLTDRAKEFKSNHLQQISMQVGFKRRLRA |
| | | | FPQAGGLIETIFDTLNKELLSLLPGYTGSNVQDRPKDAEKYACITLKELEKLLVRYFFNTYNWLDYPRV |
| | | | EGQKRHER WRSMLLSEPEVLDERSLDVCLMKVSHRKVEKYGSVEFARLIYQGDCLIPYQGEEISLRYD |
| | | | ERNITALLAYTRPAGGQPGQYIGVVRARDLKQDQISLEELRWYKRKLRKRGVKVDHDSIVAERMGLY |
| | | | EFIDEKRKSKRQRRKQANQEHQQQTNASTVVELFPQNQSVETPPDSQPDAEAFVSESQTEDRTNPPPPS |
| | | | QSVPEPLPPVDAPDSTVADLVGAEDASVVIVDEVSTPDESSDDSSLSNTVDFSHEPVVAYDWDQLLAD |
| | | | NW (SEQ ID NO: 282) |
| | TnsC | DNA | ATGGCTCAACCTGCTCCACAACCCAACGCACAATCGCAACCAGTCCCCAGCCAGTCCGCCACTAA |
| | | | GCCAGCGCCACAACAATCTGTCCTGGCATTGCCCAAGCGATCGCCAGAAAACCAGGCTGAAGTTG |
| | | | AGCGAATTCGGGACAGCGAGACTTACAAAGAGGTTTCTCGTGATCAACTTTTGTTTAAGTGGTTG |
| | | | TCGTCACAGCAGGAATCGCGTGCCAGTGGCTTTGTGTACGGAGTCAATTTTGGAGATCTGAGGAA |
| | | | ATCCTGCCAATTTTATCAACTGCTATACGTGCGGAAACGGGGAAACCTGTTTCTCACTCCCACACC |
| | | | AGTTCTCTATGCTGAGGTTGAACAGTTTGGTTCCCCGACTGACCTTTTTATTGGAATCACTCAGGC |
| | | | AGGAGGCAATCCCTTCTCAGGTATGGGATCGTTACGAGATTTGAGGAAACAGGCGGTCGGCACAC |
| | | | TTAAAAAACTTCAAACCAGCACACTGATTATTGGCTATGCAGAAGTTTTGTCCCCTGAGGCGCTC |
| | | | AAAGAACTTGTAAAAATGAGGCGAGATCTAAAAATCTCTATTATTCTTGCGGGTTCTATGTGCTTA |
| | | | TCTGAGTTCTTTGACAAGCTCGATAAGCAGCGTGGTCCAAAACACAAGGACATTAGAAACGCTTT |
| | | | TCTGGAGTCCCACCAATACCCCTGCTTCGAGAAGAATGAGACAGAAGCCATTCTCGAAGGCTGGG |
| | | | AGAATCAAGTCTTAAGCTCCTGGTCTAAAAAGCTTGATCTGAAGAAGATTCCTGGTGTTCCTAACT |
| | | | TCCTCTACACTCGCTGTGGCGGACAGGCTGAACCGCTGTACGAGATGCTCCGCAAGATAGCGATC |
| | | | CAAACGTTGGACGATCCAAAGCTGCAAATTAGTACAACCACTCTCACAGAGCTATTTGCAGCAAG |
| | | | GCGGGTAGCGGTAAGCACGTAG (SEQ ID NO: 283) |
| | | Protein | MAQPAPQPNAQSQPVPSQSATKPAPQQSVLALPKRSPENQAEVERIRDSETYKEVSRDQLLFKWLSSQ |
| | | | QESRASGFVYGVNFGDLRKSCQFYQLLYVRKRGNLFLTPTPVLYAEVEQFGSPTDLFIGITQAGGNPFS |
| | | | GMGSLRDLRKQAVGTLKKLQTSTLIIGYAEVLSPEALKELVKMRRDLKISIILAGSMCLSEFFDKLDKQ |
| | | | RGPKHKDIRNAFLESHQYPCFEKNETEAILEGWENQVLSSWSKKLDLKKIPGVPNFLYTRCGGQAEPL |
| | | | YEMLRKIAIQTLDDPKLQISTTTLTELFAARRVAVST (SEQ ID NO: 284) |
| | TniQ | DNA | ATGGTTGATGAGACAGACGAAGAATTTGAACTACCACGCTGGTGTCCAGAACCTTTTGAAGGCGA |
| | | | GAGTATCGGCAGTTATCTGGTGCGGTTTCGATCGCAAGAAATTAGCTCCATGTCTACTATCGGTAG |
| | | | TTTGAGTAGAGCACTAAAGCTGGGCACAACGTTAGGAAGATGGGAAAAGCTTCGCTTCAATCCTT |
| | | | CTCCCAGCATGGAGGAAATAGAGATCTTCTGTAACTACATAGGGCTGGCGGTAGAAAAACTCATT |
| | | | CCAACCTTTCCGGCAAAAGGGCGAAGGACGACGCCGGAACCGATTCGATTCTGTGCTTCCTGCTA |
| | | | CGCAGAAGCCACCTATCACAGACTGGAGTGGCAGGATAAAGCGATCGCCAATTGTCCCAAGCAT |
| | | | CAAGAACCTTTGCTCCATCAATGTCCAGGTTGTGAAAGACCGTTCTCGATTCCTGAGCTACTCCAG |
| | | | GGTGACCAATGTAAGTGTGGCTTGTACTTCAGACGAATGGCTGAACACCGAGAGCGGTTCCAAAG |
| | | | GAGAAAGCTTGCTAAGAGGCTCAACAGGCAAACTCATTAA (SEQ ID NO: 285) |
| | | Protein | MVDETDEEFELPRWCPEPFEGESIGSYLVRFRSQEISSMSTIGSLSRALKLGTTLGRWEKLRFNPSPSME |
| | | | EIEIFCNYIGLAVEKLIPTFPAKGRRTTPEPIRFCASCYAEATYHRLEWQDKAIANCPKHQEPLLHQCPG |
| | | | CERPFSIPELLQGDQCKCGLYFRRMAEHRERFQRRKLAKRLNRQTH (SEQ ID NO: 286) |
| PVW | TnsB | DNA | ATGATGTCTACCGAAGACGATCGCGAACAGTCAGAAGTCGTTGATGAGCCTTCAGAAACACTAGC |
| K01000017.1 | | | ACTTGATGCCAGCAACTTTGTTGCGGATTGTAAACAAACCCTGCTTGAGAATCTAGATAAACATA |
| | | | CATCAAGGTTTGCTTTAGCTCAGTGGGTAGCTAATTCTCCCAATCGCGATATTTTTCTTCAAAGGA |
| | | | AGCAAGAGATCGCCGACACATTGGAGCTTTCCATGCGGCAGGTGGAACGAATTTTAAAGAGTTAT |
| | | | CACAAAAGTGAATTAAAGGAAACCTCTGGAACTGAGAGATCAGATAAGGGTGAGTACAAAATCT |
| | | | TGCCTTACTGGGTTGACTACATTAGATGGTTCTACGATGACAGGATTGAGAAAAGGTTGTCTATAT |
| | | | CTCGTGCTGATGTTGTCAGAGAAGTAGAACGACACGCAGAAATTGACCTACAACTTCAGCCAGGT |
| | | | GAATACCCGCATCGTGCTTCGGTTTATCGTGTTTTAGCCCCTGTTGTAGCACGTGCGGCTTTACAA |
| | | | AAGAAAATTAGGAACCCCGGTTCAGGTTCATGGTTTTATCTAAAAACCCGTGATGGCGAATTCAT |
| | | | CAAAATTTTCTGTAGCAACCAGGTTATTCAGTGTGATCACACAAAACTAGATATCCTTATTGTTGA |
| | | | CAAAGATGGCAAAGTCTTGGGTCGTCCTTGGCTGACAATTGTAGTGGATAGCTTCTCTAGCTGCGT |
| | | | TTTAGGGTTTTTCCTTGGACTCAAACAACCCGGCACCGAAGAGGTAGCGCTTGCTCTACGTCATGC |
| | | | AGCTTTACCTAAACATTACCCCGACGACTATGAACTGCTAAGACCTTGGGATGTCAATGGGCTAC |
| | | | CGCTCCAGTACTTTTTCACAGATGGTGGAAAAGACTTGTCGAAAGCAAAGCACATTCAACAGATC |
| | | | GGCAGGAATTTCAACTTTAAGTGCGAGTTACGCTTTAACCCTCCTCAAGGTGGCATTGTAGAACG |
| | | | CGTTTTTAAGACCATTAATAGTAAAGTGCTTCAGGGGCTTCCAGGCTACACGGGTTCCTGTGTTGA |
| | | | AGATCGCCCAAAACACGCCGAAGAAACCGCCTGTCTAACCTGGAGGGATGTTAAGAAAATCTTG |
| | | | ACCGGGTTCTTCTGCGATAGCTATAACCACGACAAACATCCTAAGAAAAAGGGTATGACAAGGTA |
| | | | TGAATACTGGTTAGAGGGATTGGGGGGAACCTTACCAGAACCTATTGATGAGCAAGAATTAGATC |
| | | | TTTGCTTGATGAAAGCAGCATACCGCTCTGTTCAAGCCCACGGTTCAGTAAATTTTGAAAATGTTA |
| | | | CCTACAGGAGCGAAGAGCTTAAAAATCACTTGGGGGAGCGAGTAACGCTGAGATATGATCCCGA |
| | | | CCATATTCTAAGCCTTCGAGCTTATACCTATGAAGCGGATGAAAAAATGGGAGAGTTAATTGACG |
| | | | ATAATGTGAAAGCTCTCAATCTAGAATATCAGGCTCTGACTTTGGATGAATTGAAGCAAATTAAT |
| | | | GCAAAGTTGACTGAGGAAGGTAAAGAAATCGATAACTATACGATTCTTCAGGAACTGGGGCGTA |
| | | | GAACCGAAATGGTTGATGAGGCAATTCAGAACCGAAACGATCGCAGAAGAGCAGCACACAAAGA |
| | | | GGCTCGAAGTGAGCATAAAGATAACTCAACCAAACCTGGCAGTCGTAAGACAACTAAGAAAGCT |
| | | | TCAGTCACCCTCCGTGGAAGCGTACCTCCCAGCTTGGCTGAAGCAGAATTAACAGCCCCAAGTGC |
| | | | ACCTGAAGCCGAAGAGAGTGACATTTCCGCTAGCACGCTAGAGCTTTTACAGCTTCCTGATAAGC |
| | | | CTGACGGGACGGTTTTCTATCCTCTTTCCGACGATGGCAGTGCCGAAATCGTTCAGACAGAAATC |
| | | | GCTCAAGCGTCAGTTGTCGAGCAGAGTTTGGCAGCGATCGTGACTCCTCTAGCTGAAAAAGCTAC |
| | | | TACGGAAGCAGTCATTACGCCTCAAGTCGAATCCCCAAAACAGAAGGAGTGCTACGATTTCATTA |
| | | | TTTCAAAACGTTCGCGCCGAAGTCGATAG (SEQ ID NO: 287) |
| | | Protein | MMSTEDDREQSEVVDEPSETLALDASNFVADCKQTLLENLDKHTSRFALAQWVANSPNRDIFLQRKQ |
| | | | EIADTLELSMRQVERILKSYHKSELKETSGTERSDKGEYKILPYWVDYIRWFYDDRIEKRLSISRADVV |
| | | | REVERHAEIDLQLQPGEYPHRASVYRVLAPVVARAALQKKIRNPGSGSWFYLKTRDGEFIKIFCSNQVI |
| | | | QCDHTKLDILIVDKDGKVLGRPWLTIVVDSFSSCVLGFFLGLKQPGTEEVALALRHAALPKHYPDDYE |
| | | | LLRPWDVNGLPLQYFFTDGGKDLSKAKHIQQIGRNFNFKCELRFNPPQGGIVERVFKTINSKVLQGLPG |
| | | | YTGSCVEDRPKHAEETACLTWRDVKKILTGFFCDSYNHDKHPKKKGMTRYEYWLEGLGGTLPEPIDE |
| | | | QELDLCLMKAAYRSVQAHGSVNFENVTYRSEELKNHLGERVTLRYDPDHILSLRAYTYEADEKMGE |
| | | | LIDDNVKALNLEYQALTLDELKQINAKLTEEGKEIDNYTILQELGRRTEMVDEAIQNRNDRRRAAHKE |
| | | | ARSEHKDNSTKPGSRKTTKKASVTLRGSVPPSLAEAELTAPSAPEAEESDISASTLELLQLPDKPDGTVF |
| | | | YPLSDDGSAEIVQTEIAQASVVEQSLAAIVTPLAEKATTEAVITPQVESPKQKECYDFIISKRSRRSR |
| | | | (SEQ ID NO: 288) |
| | TnsC | DNA | ATGTTAGAGTCCAACTTGGTTTCACAGCCTATCGTAGAGATCTTAGCTTCGTTGGCAGACACGAG |
| | | | AGTTAAGGTGTCCGCCTTGGAAAGACTACTCAACAATGGCTATATACCAACAGATGCTGCTGAGT |
| | | | CTGCGATCAATTGGATGGACGAGCGGCGGTTTTTGAAACAATGCGGTCGGCTTGTTGCTCCACGT |
| | | | GGAAGTGGTAAAAGTCGGCTGTGTGAGGAATATGAAGATCGAGATTTTGACCGCGTTATTCGGGT |
| | | | AAAGGCTCCTACGGGATGTTCTTCTAAGCAAGTTCATAGATTAATCCTTAAAGCAATGAACCATG |
| | | | CGGCAAAGATCAGGCGGCGTGATGATCCAAGAGCAATGGTAGTCGAGAGTGTGATGCCGTTCGA |
| | | | AATTGAGGTAATCCTTATTGATAACGCGCAAAATTTGGCAGTAGAAGCATTCTCTGATCTTAAAG |
| | | | ATCTTTACGATGAGAAAAAGGTAACTATCATTTTCTCCGGCACACCTGATTTAGATGTTTCGCTGG |
| | | | AGCAAGTTGGGCTGTTGGAAAGTTTCCCTTACTCTTATCCTCTAGGTTCTTTGTCCGAAGCTGATTT |
| | | | TAAGAAAGTTTTGGACACGATCGAAGCAAAAGCACTGAATCTTCCCTTTGAATCGAAGTTAAGTG |
| | | | AGGGAGAGAAATTTGAGCTCTTAACGACATGCACAGGTAGTTTGATTGGAAGGCTGATGAAGCTT |
| | | | CTACCGACAGCAATTTTATATTCTGTTCAAAAAGTTTCAGAGCAGGAGGCGGATCAAACTGAGTC |
| | | | ACAGCCTATGTATAAGCTGGATAGCATATCTCTTGAAGCGCTTAGAAAGATTGCAGTAGGGTACG |
| | | | GGGTAAAAGTTCCGTTTGGAAAATCTAGTTCAAAGTAA (SEQ ID NO: 289) |
| | | Protein | MLESNLVSQPIVEILASLADTRVKVSALERLLNNGYIPTDAAESAINWMDERRFLKQCGRLVAPRGSG |
| | | | KSRLCEEYEDRDFDR VIRVKAPTGCSSKQVHRLILKAMNHAAKIRRRDDPRAMVVESVMPFEIEVILID |
| | | | NAQNLAVEAFSDLKDLYDEKKVTIIFSGTPDLDVSLEQVGLLESFPYSYPLGSLSEADFKKVLDTIEAK |
| | | | ALNLPFESKLSEGEKFELLTTCTGSLIGRLMKLLPTAILYSVQKVSEQEADQTESQPMYKLDSISLEALR |
| | | | KIAVGYGVKVPFGKSSSK (SEQ ID NO: 290) |
| | TniQ | DNA | ATGACCAGCAAGCTTAGTAAATACCCCAGATTGCCACCCCTTGAGCCTTACTCAGGCGAAAGCCT |
| | | | ACCACATTATCTTGGTAGATTTCGACGCCTAAAAAGCACCGGAGCACCCTCTCCAAGTGCGTTGG |
| | | | GACAAATGGTGGGGATTGGTGCGGTTGTGGCTCAATGGGAACAGGGGTATTTCAACCCTTTTCCA |
| | | | ACAGTTGAGCAGCTTTCTACTTTAGGGACAGTCATCGGTTTAGACATGGATACATTAACCCGGAT |
| | | | GCTGCAACCAAAAGGGGTAACGTTAGATTCAAGACCAATTCGTTTATGTGGAGCTTGTTACGCCG |
| | | | AGCACCCTTGTCACCGGATTAAGTGGCAGTTCAAATCCAAATTGAGTCCAAGGTGCGATCACCAC |
| | | | AAGCTCAAACTATTAATGAAATGCCCAGGCTGTGAGCAGCCATITCCAGTTCCTTCGCTTTGGCTA |
| | | | GAAGGAAAATGCCAAAACGCAAAATGCGGCATGCGATACTCAAGAATGGCGAAGCATCAGAAGT |
| | | | CCGTGCTTTATTAA (SEQ ID NO: 291) |
| | | Protein | MTSKLSKYPRLPPLEPYSGESLPHYLGRFRRLKSTGAPSPSALGQMVGIGAVVAQWEQGYFNPFPTVE |
| | | | QLSTLGTVIGLDMDTLTRMLQPKGVTLDSRPIRLCGACYAEHPCHRIKWQFKSKLSPRCDHHKLKLL |
| | | | MKCPGCEQPFPVPSLWLEGKCQNAKCGMRYSRMAKHQKSVLY (SEQ ID NO: 292) |

[0089] Table 6 includes example transposon proteins from Table 9 of PCT/US20/58405, filed on Oct. 30, 2020, incorporated herein by reference.

TABLE 6
Transposon Systems From PCT/US20/58405

| Plasmids | Expression cassette sequences |
|---|---|
| IB20_pCMV- | HA-NLS-TniQ1: |
| HA-NLS-TniQ1 | MYPYDVPDYAPKKKRKVGGSGGGGSGGGGSGGTIYSEHWSLNPLEIPQRSRLFSLEPVAVGTPY |
| | AESLSSYLHRLAQAHCLTSEKLVMGEIAPLILKDEDKSELLSKNLSHLLGNSDAKPAINGMREMT |
| | EKLVTVLEELTMRQDLRFLTLLSWKGMIYDKGLFRNYRAWCPCCCEEWMQKNKTIYEPLSWSF |
| | KDVEFCLIHKQRLIEECSHCGARLPVMARLSPAGFCSRCYGWLGQEIKGEEEIEKYRVNIQGISEL |
| | IALTPQLGYKPIPIELTRKLQLILLVFEQAIGKDVKLLGDLGGIMESLRIASTTNQSQPYHLVKLIIP |
| | VCEKAKISVFQLFGSDFKELGKILFGNFSLELKL* (SEQ ID NO: 293) |
| IB20_pCMV- | HA-NLS-TniQ2 |
| HA-NLS-TniQ2 | MYPYDVPDYAPKKKRKVGGSGGGGSGGGGSGGLASVLETYESWNLKKPLIPQRSRLYQPQPVG |
| | IGTPYIESLTGYITRIAELHGVLPGVLMTREIAPLVNKIYFQNGANRGFREIFNRSQALNGMGEMA |
| | ADLVQVLQKLTLRDDLRFLTMLFWSNILTPRNLFRTRKAWCPICYQERHQNGLVVYEQLLWTIN |
| | LITICPQHQKPLVELCPHCNHESPLLNWRSRPGYCSKCGEWLGANQCLKTFTDGEGSIKLQLEW |
| | QYWTANVVGELILASQCFESAPSKENITKSLNIVIDKVAENNAAAFSRLIGVPKNSLWMWQSTK |
| | TLPELNTLLKICYELEISLVEFLTPKNLITKSFTKISQKHLQLSRTPRVSPKSFDQYQVKDALLAILA |
| | GNEEPPPTMEEVGKRLGHHNRTISRHFPDLCSAISAKCRNYNKACRLKSIEKLCSEVREIVLSLNA |
| | QGVYPTEGRVCELMPNPGCFRYKQVRAAFNDARREFGL* (SEQ ID NO: 294) |
| IB20_pCMV- | HA-NLS-TnsA |
| HA-NLS-TnsA | MYPYDVPDYAPKKKRKVGGSGGGGSGGGGSGGKEQFEQWVARLQISEAGQKIIEKVRSSEPSR |
| | RVGGGSKNVSGRYPSRKMGVTIQFESHRVELPIIYQLEHDKDVLEFYDQPPQIKLDYQASNGRRL |
| | GVLHTPDLFVIRTNSAGWEECKTEQDLKKLAEKNPNRYFYSEENNQWHSLPGEVYANQFGLYH |
| | RIHSDREINWVLQRNLQFLEDYYRSESLVVEEAIAQSLLAIVSSQPGITLAELLNRSTGAKSDDIYT |
| | LIIQEQIYIDLNATPLAEPERCLIFRDEQTASAYRLMVEQPSVSLPAISPVVNIVTGATVSWDGKGL |
| | NIIHVGETEVILGAENNQLIELKKAIFENLVRQGKITSLQTPEKTAISTESWQRFHQASPEDQAEAL |
| | ERYKTIEPYLNGHPPENETIPARTIRHWKAKYLIAIQKYGCGYIGLLSHRSVKGNRQRKLPEDTLA |
| | IMEKFILEDYETLKQKRMWEVHAALVRACEEAGVIAPSYKAFTKEVQRRTGYEQTKKRQGRRA |
| | AYQHESFYWELAITTPRHGDRPFEIGHIDHTELDVELVCSDTGRNLGRPWATFLVDAYSRRLLA |
| | VYLTFDSPSYRSCLMVLRICVKRHGRLPQIVVVDNGAEFHSVYFETLLATFECTKKQRPPAKARF |
| | GSVCERLFGTSNTQFVHNLLGNTQITRNVRQVTKSVNPKNLAVWTLGLLYEYLCAWAYEVYDT |
| | DEHPALFQSPRDAFAAGMAIGGSRVHRMIPYDENFQILTLPTTSEGKAKVQVGRGIKINYIYYWS |
| | NSFRDPQIENTSVQIRYDPFNIGIAYAFVRGQWVQCISQYYAELQGRSEKELKLASIELRKHYSNH |
| | TQQSKVSAKNLAEFLASVEAQEALLEQRSYDAEVKEVFRVIEGGKATTSRNEEPKLIQVTFANTD |
| | FQADEDEAIVPETLVVYEEF* (SEQ ID NO: 295) |
| IB20_pCMV- | HA-NLS-TnsC |
| HA-NLS-TnsC | MYPYDVPDYAPKKKRKVGGSGGGGSGGGGSGGTKSTGFPLELLTRPATERLAYFENYTVAHPR |
| | LKEVYEILMRTIAEPAGASFIFVYGASGVGKTTLRLRVEQKLTELALPKLESDRARVPVVGIEAIA |
| | PESRYFNWKEYYTRALITLEEPLIDHKFDYGVRGISRDNFGKINVESKVVAPALRRALENALIHR |
| | HPDVFFVDEAQHFGKVASGYKLQDQLDCLKSLANMTGILHCLLGTYELLTFRNLSGQLSRRSVD |
| | IHFRRYCADSPEDVQAFKSVLLTFQQHLPLAETPNLVDHWEYFYERTLGCIGTLKDWLKRVLSD |
| | ALDREATTITLKDLQKRALSVAQCQKMFKEIQEGERQLSETEADVQNLRSALGLGAKPIVLPEET |
| | PKTTRPPGKVGKRKPKRDPIGVQQDVS* (SEQ ID NO: 296) |
| IB20_pCMV- | TniQ1-NLS-HA |
| TniQ1-NLS-HA | MTIYSEHWSLNPLEIPQRSRLFSLEPVAVGTPYAESLSSYLHRLAQAHCLTSEKLVMGEIAPLILK |
| | DEDKSELLSKNLSHLLGNSDAKPAINGMREMTEKLVTVLEELTMRQDLRFLTLLSWKGMIYDK |
| | GLFRNYRAWCPCCCEEWMQKNKTIYEPLSWSFKDVEFCLIHKQRLIEECSHCGARLPVMARLSP |
| | AGFCSRCYGWLGQEIKGEEEIEKYRVNIQGISELIALTPQLGYKPIPIELTRKLQLILLVFEQAIGKD |
| | VKLLGDLGGIMESLRIASTTNQSQPYHLVKLIIPVCEKAKISVFQLFGSDFKELGKILFGNFSLELK |
| | LGGSGGGGSGGGGSGGPKKKRKVYPYDVPDYA* (SEQ ID NO: 297) |
| IB20 pCMV- | TniQ2-NLS-HA: |
| TniQ2-NLS-HA | MLASVLETYESWNLKKPLIPQRSRLYQPQPVGIGTPYIESLTGYITRIAELHGVLPGVLMTREIAPL |
| | VNKIYFQNGANRGFREIFNRSQALNGMGEMAADLVQVLQKLTLRDDLRFLTMLFWSNILTPRN |
| | LFRTRKAWCPICYQERHQNGLVVYEQLLWTINLITICPQHQKPLVELCPHCNHESPLLNWRSRPG |
| | YCSKCGEWLGANQCLKTFTDGEGSIKLQLEWQYWTANVVGELILASQCFESAPSKENITKSLNI |
| | VIDKVAENNAAAFSRLIGVPKNSLWMWQSTKTLPELNTLLKICYELEISLVEFLTPKNLITKSFTKI |
| | SQKHLQLSRTPRVSPKSFDQYQVKDALLAILAGNEEPPPTMEEVGKRLGHHNRTISRHFPDLCSA |
| | ISAKCRNYNKACRLKSIEKLCSEVREIVLSLNAQGVYPTEGRVCELMPNPGCFRYKQVRAAFND |
| | ARREFGLGGSGGGGSGGGGSGGPKKKRKVYPYDVPDYA* (SEQ ID NO: 298) |
| IB20_pCMV- | TnsA-NLS-HA |
| TnsA-NLS-HA | MKEQFEQWVARLQISEAGQKIIEKVRSSEPSRRVGGGSKNVSGRYPSRKMGVTIQFESHRVELPII |
| | YQLEHDKDVLEFYDQPPQIKLDYQASNGRRLGVLHTPDLFVIRTNSAGWEECKTEQDLKKLAEK |
| | NPNRYFYSEENNQWHSLPGEVYANQFGLYHRIHSDREINWVLQRNLQFLEDYYRSESLVVEEAI |
| | AQSLLAIVSSQPGITLAELLNRSTGAKSDDIYTLIIQEQIYIDLNATPLAEPERCLIFRDEQTASAYR |
| | LMVEQPSVSLPAISPVVNIVTGATVSWDGKGLNIIHVGETEVILGAENNQLIELKKAIFENLVRQG |
| | KITSLQTPEKTAISTESWQRFHQASPEDQAEALERYKTIEPYLNGHPPENETIPARTIRHWKAKYLI |
| | AIQKYGCGYIGLLSHRSVKGNRQRKLPEDTLAIMEKFILEDYETLKQKRMWEVHAALVRACEEA |
| | GVIAPSYKAFTKEVQRRTGYEQTKKRQGRRAAYQHESFYWELAITTPRHGDRPFEIGHIDHTELD |
| | VELVCSDTGRNLGRPWATFLVDAYSRRLLAVYLTFDSPSYRSCLMVLRICVKRHGRLPQIVVVD |
| | NGAEFHSVYFETLLATFECTKKQRPPAKARFGSVCERLFGTSNTQFVHNLLGNTQITRNVRQVT |
| | KSVNPKNLAVWTLGLLYEYLCAWAYEVYDTDEHPALFQSPRDAFAAGMAIGGSRVHRMIPYD |
| | ENFQILTLPTTSEGKAKVQVGRGIKINYIYYWSNSFRDPQIENTSVQIRYDPFNIGIAYAFVRGQW |
| | VQCISQYYAELQGRSEKELKLASIELRKHYSNHTQQSKVSAKNLAEFLASVEAQEALLEQRSYD |
| | AEVKEVFRVIEGGKATTSRNEEPKLIQVTFANTDFQADEDEAIVPETLVVYEEFGGSGGGGSGGG |
| | GSGGPKKKRKVYPYDVPDYA* (SEQ ID NO: 299) |
| IB20_pCMV- | TnsC-NLS-HA: |
| TnsC-NLS-HA | MTKSTGFPLELLTRPATERLAYFENYTVAHPRLKEVYEILMRTIAEPAGASFIFVYGASGVGKTT |
| | LRLRVEQKLTELALPKLESDRARVPVVGIEAIAPESRYFNWKEYYTRALITLEEPLIDHKFDYGVR |
| | GISRDNFGKINVESKVVAPALRRALENALIHRHPDVFFVDEAQHFGKVASGYKLQDQLDCLKSL |
| | ANMTGILHCLLGTYELLTFRNLSGQLSRRSVDIHFRRYCADSPEDVQAFKSVLLTFQQHLPLAET |
| | PNLVDHWEYFYERTLGCIGTLKDWLKRVLSDALDREATTITLKDLQKRALSVAQCQKMFKEIQE |
| | GERQLSETEADVQNLRSALGLGAKPIVLPEETPKTTRPPGKVGKRKPKRDPIGVQQDVSGGSGG |
| | GGSGGGGSGGPKKKRKVYPYDVPDYA* (SEQ ID NO: 300) |

[0090] Tables 7-45 includes examples of Type I-F Cas-associated transposase systems from Table 7-45 of U.S. 63/089,220, filed on Oct. 8, 2020, incorporated herein by reference.

[0091] 23319|4|ArcOceMetagenome_4 $F_3300009432|0115005_10000005|200650|Ga0 115005_10000005 (ID: 97)

TABLE 7

| Elements | Sequences |
|---|---|
| tnsA | ATGTACATCCGGAACCTGCGGAAGCCCTCTCCAAACAAGAACGTGTTCAAGTTCGCCAGCACCAAGGTGTCCAA |
| | CGTGATCATGTGCGAGAGCACCCTGGAATTCGACGCCTGCTTCCACAACGAGTACAACGACGAGATCGAGAGCT |
| | ACGGCTCTCAGCCCGAGGGCTTTCAGTACGAGTTCAACGGCAAGCTGCTGCCCTACACACCCGACGCTCTGATCC |
| | TGTACAAGAACGGCGTGGAAAAGTACCACGAGTATAAGCCCTACAGCAAGATCAGCAGCCCTCTGTTCAGAGAG |
| | CAGTTTATCGCCAAGAGAGCCGCCAGCCTGGAACTGGGCAGAGAGCTGATCCTGGTCACCGACAGACAGATCAG |
| | AGTGAACCCCATCCTGAACAACCTGAAACTGCTGCACCGGTACAGCGGCGTGTACGGCGTTAGCGACATCCAGA |
| | GAAAGCTGCTCGAGTACATCCAGCAGTCTGGCGCCGTGAAGCTGAACGACATCAGCCACAGATTCAACCTGAGC |
| | GTGGGCGAGACAAGAAGCTTCCTGTACGCCCTGATCCACAAGGGCTTCGTGAAGGCCGACCTGGAAAGAGAGAG |
| | CCTGAGCGACAACCCTCTCGTGTGGTCCATCTGCAACGGCTGA (SEQ ID NO: 301) |
| tnsB | ATGGCCGACTTCAACGACGAGTTCGATGAGTTCGACGTGCCCGTGAAGCCTGAGATCCCCATCCAGTACGTGAAG |
| | CTGGAAGATGCCAAGACCATCAAGCGCGACCTGGATACCTTTCCTGACTTCCTGAAAGAGAAGGCCCTGGACAA |
| | GTACAAGCTGCTGTGCATCATCGAGAAAGAGGACCCCGGCAGCTGGACCCAGAAGAATCTGGACCCCATCCTGG |
| | ATAAGCTGTTCGCCGAGAGCGAGCTGAACAGACCCAATTGGAGAACCGTGGCCAGATGGCGGAAGCGGTACATC |
| | GACAGCAATGGCGATCTGACCAGCCTGGTGTCCGCCAGACACAAGATGGGCAACAGAAGCAAGCGGATCGAGG |
| | GCGACGAGAAGTTCTTCGACGAGGCCCTGAAGTACTTTCTGGACGCCAAGCGGCTGTCTATCGCCACAGCCTACC |
| | GGTACTACAAGGACCTGATCATCATTGAGAACGAGAAGATCGTGGACGGCAAGATCCCTATCATCAGCTACACC |
| | AGCTTCAACAAGCGCATCAAGACCACCTCTCCATACGACGTGACAGTGGCCAGACGGGGCAAGTTCAAGGCCGA |
| | GGAACTGTATGGCGCCTGCGCCGCTCATATCCTGCCTACCAGAATCCTGGAACGCGTGGAAATCGATCACACCCC |
| | TCTGGACATCATCCTGCTGGACGATGAGCTGGGCATCCCCATCGGCAGACCTAATCTGACAGCCCTGATCGACGT |
| | GTTCAGCGGCTGCCTGCTGGGCTTTCACCTGAGCTATAACGCCCCTAGCTATGTGTCTGCCGCCAAGGCCATTAG |
| | CCACGCCGTGAAACCTAAGCTGCTGAGCAGCCTGAACATCACCCTGCAGAACGACTGGCCCTGCTATGGCAAGA |
| | TCGAGAACCTGGTGGTGGACAACGGCGCCGAGTTTTGGAGTGATGCCCTGGAACACGCCTGCAAAGAGACAGGC |
| | ATCAACACCCAGTACAACAAAGTGGGCAAGCCCCAGCACAAGCCCACCATCGAGAGATTCTTCGGCCTGATCAA |
| | CCAGTACTTCCTGGATGAGTTCCCCGGCAAGACCTTCAGCAACATCCTGGCCAAAGAGAAGTACAACCCCGAGA |
| | AGAACGCCGTGATCCGGTTCAGCACCTTCGTGAAAGAATTCCACAGATGGGTCGTCGACGTGTACCACCAGGAC |
| | AGCGACAGCAGAAAGACACGGATCCCAATCCAGCAGTGGAAGAAGGGCTTCGACGCCTATCCTCCACTGAAGAT |
| | GAGCGACGAGGAAAGCAAGCTGTTCTCTATCCTGCTGAACGTGCTGAAGAAGCCCACACTGACCCGGAACGGCA |
| | TCAAGTTCGAGAATCTGATGTACGACAGCACAGCCCTGTCCGAGTACCGGAAGCAGTACCCTCAGACAAAGGGC |
| | ACCGCCAAGAAGATCATCAAGATCGACCCCGACGACCTGAGCAAGATCTACATCCACCTGGAAGAACTGGAAAC |
| | CTACCTGGAAGTGCCCTGCACCGATACCACCGGCTACACCAAGAACCTGAGCCTGTACGAGCACAAGAAGATTT |
| | CCAAGATCAAGCGGAAGATGATCGATGAGTACATCGATAACAGCGCCCTGGCCAAGGCTCGGATGGCCAAGAGA |
| | GAGAGCATCAAGAAAGAGCAAGAGCTGAGCCTGACCAACAAGAGCAAGGCCAAGATCAGCAGCGTGAAGAAGC |
| | AGGCCCAGCTGGCCGGCATCTCTAATACCGGACCTGGCACCATTCTGGTCAAAGAGGACAGCAGCAGCATCCCC |
| | AAGAGCAACGACACCAACAACATGTTCGACGACTGGGACAACGACCTGGAAGCCTTCGAGTGA (SEQ ID NO: |
| | 302) |
| tnsC | ATGAACGTGCTGACCGAGGTGCAGATCGAGCAGCTGAGAAACTTCAGCGACTGCATCGTGATGCACCCTCAGAT |
| | CAAGACCATCTTCAACGACTTCGACGAGCTGCGGCTGAACCGGAAGTTCCAGAGCGATCAGCAGTGTATGCTGCT |
| | GATTGGCGATACCGGCGTGGGCAAGAGCCACACCATCAACCACTACAAGAAACGCGTGATCGCCACACAGAACT |
| | ACAGCCGGAACACCATGCCTGTGCTGATCTCCAGAATCAGCAGAGGCAAAGGCCTGGACGCCACACTGGTTCAG |
| | ATGCTGGCTGACCTGGAACTGTTCGGCAGCAGCCAGATTAAGAAGCGGGGCTACAAGACCGACCTGACCAAGAA |
| | ACTGGTGGAAAGCCTGATCAAGGCCCAGGTGGAACTGCTGATTATCAACGAGTTCCAAGAGCTGATCGAGTTCA |
| | AGTCCGTGCAAGAGCGGCAGCAGATCGCCAACGGCCTGAAGTTCATCAGCGAAGAGGCCAAGGTGCCCATCGTG |
| | CTCGTTGGAATGCCTTGGGCCGCCAAGATTGCCGAGGAACCTCAGTGGGCCTCTAGACTCGTGCGGAAGCGGAA |
| | GCTGGAATACTTTAGCCTGAAGAACGACAGCAAGTACTTCCGGCAGTACCTGATGGGCCTCGCCAAGCAGATGA |
| | GCTTCGATGCCCCTCCTAAGCTGGAAAGCCGGCACACAACAATCGCCCTGTTCGCCGCTTGCAGAGGCGAGAATA |
| | GAGCCCTGAAACATCTGCTGTCTGAGGCCCTGAAGCTGGCCCTGAGCTGTAACGAGCACCTGGAAAACAAGCAC |
| | TTCTTCACCGCCTACGGCAAGTTCGACTTCTTCAATGACAAAGAGAAGCTGAAGCTCAAGAACCCCTTCAAGCAG |
| | GACATCAAGGACATCGAGATCTACGAAGTGATCAAGAGCAGCAGCTACAACCCCAACGCTCTGGACCCCGAGGA |
| | TATGCTGCTCGGCAGACAGTTCAGCTCCATCAAGTGA (SEQ ID NO: 303) |
| tnsD | ATGGCCTTCCTGTTCAGCCCTAAGGCCAGAGCCTTTAGCGACGAGAGCCTGGAAAGCTACCTGCTGAGAGTGGTG |
| | TCCGAGAACTTCTTCGACAGCTACGAGGGCCTGAGCCTGGCCATCAGAGAGGAACTGCACGAGCTGGATTTTGA |
| | GGCCCACGGCGCCTTTCCAGTGGACCTGAAGAGACTGAACGTGTACCACGCCAAGCACAACAGCCACTTCCGGA |
| | TGAGAGCCCTGGGCCTGCTGGAAACACTGCTGGACCTGCCTAGATACGAGCTGCAGAAGCTGGCCCTGTTCAAG |
| | AGCGACATCAAGTTCAACAGCAGCACAGCCCTGTACAAGAACGGCGTGGACATCCCTCACAAGTTCATCCGGTA |
| | TCACCCCGAGGACGCCGTGGATAGCATTCCTGTGTGTCCTCAGTGCCTGGCCGAGGAAGCCTACATCAAGCAGAG |
| | CTGGCACATCAAATGGGTCAACGCCTGCACAAAGCACAAGTGCGCCCTGCTGCACAACTGCCCTGAATGCTGCG |
| | CCCAGATCAACTACATCGAGAACGAGAGCATCACCCACTGCAGCTGCGGCCTGGAACTGACCTGTGCCTCTACA |
| | AGCCCCGTGAACACCCTGAGCATCGAGCACCTGAACAAGCTGCTGGACAAGAGCGAGGGCAACGACAGCAACCT |
| | GCTGTTCAACAACACCACACTGACCGAGAGATTCGCCGCTCTGCTGTGGTATCAAGAGCGGTACAGCCAGACCG |
| | ACAACTTCTGCCTGGATGTGGCCGTGGACTACTTCAGCAAATGGCCTGCCGTGTTCTACAAAGAGCTGGACGAGC |
| | TGTCTAAGTACGCCGAGATGAAGCTGATCGACCTCTTCAACAAGACCGAGTTCAAGTTTATCTTCGGCGACGCCA |
| | TCCTGGCCTGTCCTAGCACACAGAAGCAGAGAGAGCTGCACTTCATCTACAGAGCCCTGCTGGACTACCTGGTCA |
| | CCCTGGTGGAAAGCAACCCCAAGACCAAGAAGCCCAACGCCGCCGATCTGCTGGTGTCTGTTCTGGAAGCTGCC |
| | ACTCTGCTGGGCACCTCTGTGGAACAGGTGTACAGACTGTACCAGGACGGCATCCTGCAGACCGTGTCCAGACAC |
| | AAGATGAACCAGCGGATCAACCCCTACAAGGGCGTGTTCTTCCTGCGGCACGTGATCGAGTACAAGACCAGCTT |
| | CGGCAACGATAAGGCCCGGATGTACCTGTCTGCTTGG (SEQ ID NO: 304) |

[0092] 24897|692|CrToilmet3SPAdes_$F_3300027742|0209121_10000693|35625|Ga020 9121_10000693 (ID: 98)

TABLE 8

| Elements | Sequences |
|---|---|
| tnsA | ATGTACATCCGGAACCTGCGGAAGCCCTCTCCAAACAAGAACGTGTTCAAGTTCGCCAGCACCAAGGTGTCCAGCGT |
| | GGTCATGTGTGAAAGCAGCCTGGAATTCGACGCCTGCTTCCACCACGAGTACAACGACCTGATCGAGAGCTTCGGCT |
| | CTCAGCCCGAGGGCTTCAAGTACAAGTTCATGGGCAAGAGCCTGCCTTACACACCCGACGCTCTGATCAGCTACACC |
| | GACAAGACCCAGAAGTATCACGAGTATAAGCCCTACAGCAAGATCGCCTCTCCTCTGTTCCGGGCCGAGTTTGCCGCT |
| | AAAAGAGCCGCCTCTCTGAAGCTGGGCATCGACCTGGTGCTGGTCACCGACAGACAGATCAGAGTGAACCCCATCCT |
| | GAACAACCTGAAGCTGCTGCACAGATACAGCGGCGTGTACGGCATCAGCGGCATCCAGAATGAGCTGCTGAGCTTCA |
| | TCCACAAGAGCGGCGTGATCAAGCTGAACGACATCAGCAGCCAAGTGGGCATCCCCATCGGCGAGACAAGAAGCTT |
| | CCTGTTCGGCCTGATGCACAAGGGCCTCGTGAAAGCCGATCTGGGCTGCGACGACCTGACCAACAATCCCACACTGT |
| | GGGCCACACCTTGA (SEQ ID NO: 305) |
| tnsB | ATGGGCTACACCATGACCGATTTCTTCAACGAGTTCGACGAGAGCCTGGTGCCTCTGAAGCCCCAGACACCTACACA |
| | GTACGTGAAGCTGGACGACGCCAACCTGATCCAGAGAGATCTGGACACCTTCTCCGACACCTTCAAGAATCAGGCCC |
| | TGCAGCGGTACAAGCTGATCTCCACCATCGACAAGAAGCTGAGCAGAGGCTGGACCCAGAGGAATCTGGACCCCATC |
| | CTGGACGAGCTGTTCAAAGGCGGAGATGTCGTGCGGCCCAATTGGAGAACAGTGGCCAGATGGCGGAAGAAGTACA |
| | TCGAGAGCAACGGCGACATTGCCAGCCTGGCCGACAAGAACCACAAGATGGGCAACCGCACCAACCGGATCAAGGG |
| | CGACGACAAGTTCTTCGACAAGGCCCTGGAACGGTTCCTGGACGCCAAGAGGCCTACAATCGCCACCGCCTACCAGT |
| | ACTACAAGGACCTGATCGTGATCGAGAACGAGAGCATCGTGGAAGGCAAGATCCCCATCATCAGCTACAACGCCTTC |
| | AACAAGCGCATCAAGGCCATTCCTCCATACGCCGTGGCCGTGGCCAGACACGGAAAGTTTAAAGCCGACCAGTGGTT |
| | CGCCTACTGCGCCGCTCATGTGCCTCCAACCAGAATCCTGGAACGCGTGGAAATCGATCACACCCCTCTGGATCTGAT |
| | CCTGCTGGACGATGAGCTGCTGATCCCTATCGGCAGACCCTACCTGACACTGCTGATCGACGTGTTCAGCGGCTGCGT |
| | GCTGGGCTTTCACCTGAGCTACAAGAGCCCCAGCTATGTGTCTGCCGCCAAGGCCATCACACACGCCATCAAGCCCA |
| | AGAGCTTCGACGCCCTGAACATCGAGCTGCAGAACGACTGGCCTTGCTTCGGCAAGTTCGAGAACCTGGTGGTGGAC |
| | AACGGCGCCGAGTTCTGGTCCAAGAATCTGGAACACGCCTGTCAGAGCGCCGGCATCAACATCCAGTACAACCCTGT |
| | GCGGAAGCCCTGGCTGAAGCCCTTCATCGAGAGATTCTTCGGCGTGATGAACGAGTACTTCCTGCCTGAGCTGCCCGG |
| | CAAGACCTTCAGCAACATCCTGGAAAAAGAAGAGTACAAGCCCGAGAAGGACGCCATCATGCGGTTCAGCACCTTCG |
| | TGGAAGAGTTCCACAGATGGATCGCCGACGTGTACCACCAGGACAGCAACAGCAGAGAGACACGGATCCCAATCAA |
| | GCGGTGGCAGCAGGGCTTCGATGCCTATCCTCCTCTGACCATGAACGAGGAAGAAGAAACCCGGTTCTCCATGCTGA |
| | TGCGGATCAGCGACAGCAGAACCCTGACCAGAAACGGCTTCAAGTACCAAGAGCTGATGTACGACAGCACAGCCCT |
| | GGCCGATTACCGGAAGCACTACCCTCAGACCAAAGAAACCGTGAAGAAACTGATCAAGGTGGACCCCGACGACATC |
| | AGCAAGATCTACGTGTACCTGGAAGAACTCGAGAGCTATCTCGAGGTGCCCTGCACCGATCCTACCGGCTATACAGA |
| | TGGCCTGAGCATCTACGAGCACAAGACCATCAAGAAAATCAACCGGGAAGTGATCCGCGAGAGCAAGGATTCTCTG |
| | GGCCTCGCCAAAGCCAGAATGGCCATCCACGAGAGAGTGAAGCAAGAGCAAGAGGTGTTCATCGAGTCCAAGACCA |
| | AGGCCAAGATCACCGCCGTGAAAAAGAGAGCCCAGATTGCTGACGTGTCCAACACCGGCACCAGCACCATCAAGGT |
| | GTCCGAGGAATCAGCCACACCTGTGCAGAAGCACATCTCCAACGACAACAGCGACGACTGGGCCGACGATCTGGAA |
| | GCCTTTGAGTGA (SEQ ID NO: 306) |
| tnsC | ATGAATGCCCTGACCGAGATCCAGATCGAGAAGCTGCGGAACTTCAGCGACTGCATCGTGATGCACCCTCAGATCAA |
| | GACCATCTTCAACGACTTCGACGAGCTGCGGCTGAACCGGAAGTTCCAGAGCGATCAGCAGTGTATGCTGCTGATTG |
| | GCGATACCGGCGTGGGCAAGAGCCACACCATCAACCACTACAAGAAACGCGTGCTGGCCACACAGAACTACAGCCG |
| | GAATACCATGCCTGTGCTGGTGTCCAGAATCAGCAGAGGCAAAGGCCTGGACGCCACACTGGTTCAGATGCTGGCTG |
| | ACCTGGAACTGTTCGGCAGCAGCCAGATTAAGAAGCGGGGCTACAAGACCGACCTGACCAAGAAACTGGTGGAAAG |
| | CCTGATCAAGGCCCAGGTGGAACTGCTGATTATCAACGAGTTCCAAGAGCTGATCGAGTTCAAGTCCGTGCAAGAGC |
| | GGCAGCAGATCGCCAACGGCCTGAAGTTCATCAGCGAAGAGGCCAAGGTGCCCATCGTGCTCGTTGGAATGCCTTGG |
| | GCCGCCAAGATTGCCGAGGAACCTCAGTGGGCCTCTAGACTCGTGCGGAAGCGGAAGCTGGAATACTTCAGCCTGAA |
| | GAACGACAGCAAGTACTTCCGGCAGTACCTGATGGGCCTCGCCAAGAAAATGCCCTTCGACGTGCCACCTAAGCTGG |
| | AAAGCAAGAACACCACAATCGCCCTGTTCGCCGCCTGCAGAGGCGAGAATAGAGCCCTGAAACATCTGCTGCTGGAA |
| | GCCCTGAAGCTGGCCCTGAGCTGCAACGAGTACCTGGAAAACAAGCACTTCATCACCGCCTACGACAAGTTCGACTT |
| | CTTCAATGACAAAGAGAAGCTCAAGAGCAAGAACCCCTTCAAGCAGGACATCAAGGACATCGAGATCTACGAAGTG |
| | ATCAAGAACAGCAGCTACAACCCCAACGCTCTGGACCCCGAGGACATGCTGACCGATAGAGTGTTCGCCATCGTGAA |
| | GTGA (SEQ ID NO: 307) |
| tnsD | ATGGCCTTCCTGTTCAGCCCTAGAGCCAGAGCCTTTAGCGACGAGAGCCTGGAAAGCTACCTGCTGAGAGTGGTGTC |
| | CGAGAACTTCTTCGACAGCTACGAGGGCCTGAGCCTGGCCATCAGAGAGGAACTGCACGAGCTGGATTTTGAGGCCC |
| | ACGGCGCCTTTCCAATCGACCTGAAGAGACTGAACGTGTACCACGCCAAGCACAACAGCCACTTCCGGATGAGAGCC |
| | CTGGGCCTGCTGGAAACACTGCTGGACCTGCCTAGATACGAGCTGCAGAAACTGGCCCTGCTGAAGTCCGACATCAA |
| | GTTCAACAGCAGCGCCGCTCTGTACAACAACGGCGTGGACATCCCTCTGCGGTTCATCAGACATCATGCCGAGGGCG |
| | CTGTGGACAGCATCCCTGTTTGTCCTCAGTGCCTGGCCGAGGAAGCCTACATCAAGCAGAGCTGGCACATCAAATGG |
| | GTCAACGCCTGCACCAAGCACCAGTGTGCCCTGCTGCACAATTGCCCTGAGTGCTGCGCCCCTATCAACTACATCGAG |
| | AACGAGAGCATCACCCACTGCAGCTGCGGCTTCGAACTGAGCTGTGCCAGCACAAGCCCCGTGAACACACTGAGCAT |
| | CGAGCACCTGAACAAGCTGCTGGACAAGGGCGAGAGAAACGACAGCAACCCACTGTTCAACAACATGACCCTGACC |
| | GAGAGATTCGCCGCACTGCTGTGGTATCAAGAGCGGTACAGCCAGACCGACAACTTCTGCCTGAACGACGCCGTGAA |
| | CTACTTCAGCAAGTGGCCTGCCGTGTTCAACACCGAGCTGGACGAGCTGAGCAAGAACGCCGAGATGAAGCTGATCG |
| | ACCTGTTTAACAAGACCGAGTTCAAGTTCATCTTCGGCGACGCCATCCTGGCCTGTCCTAGCACACAGAAGCAGAGC |
| | GAGAGCCACTTCATCTACAAAGCCCTGCTGGACTACCTGGTCACCCTGGTGGAAAGCAACCCCAAGACCAAGAAGCC |
| | CAACGCCGCCGATCTGCTGGTGTCTGTTCTGGAAGCTGCCACTCTGCTGGGCACCTCTGTGGAACAGGTGTACAGACT |
| | GTACCAGGACGGCATCCTGCAGACCGCCTTCCGGCACAAGATGAACCAGCGGATCAACCCCTACAAGGGCGCCTTCT |
| | TTCTGCGGCACGTGATCGAGTACAAGACCAGCTTCGGCAACGACAAGGCCCGGATGTATCTGAGCGCTTGGTGA |
| | (SEQ ID NO: 308) |

[0093] 26705|1051|GOMGT1mesoSPAdes_2_$F_3300025731|a0209396_1001052|31432|Ga0209396_1001052 (ID: 99)

TABLE 9

| Elements | Sequences |
|---|---|
| tnsA | ATGACCAACTGCCTGTTCCTGCTGTTCAGCCTGTACAGCATCCCCAGAAAGACCCTGGGCAGCTGCATGTACATCCGG |
| | AACCTGAGAAAGCCCTCTCCGAACAAGAACATCTTCAAGTTCGCCAGCACCAAGGTGTCCCACGTGATCATGTGCGA |
| | GAGCACCCTGGAATTCGACGCCTGCTTCCACCACGAGTACAACGACGCCATCGAGAGCTACGGCTCTCAGCCTGAGG |
| | GCTTCAAGTACCAGTTCATGGGCAAGAGCCTGCCTTACACACCCGACGCTCTGATCCTGTACAAGAACAGCGTGGAA |
| | AAGTACCATGAGTACAAGCCCTACAGCCAGATCAGCAGCCCTCTGTTCAGAGAGAAGTTCGCCGCCAAGAGAATCGC |
| | CAGCCTGAAGCTGGGCAGAGATCTGATCCTCGTGACCGACCGGCAGATCAGAGTGAAGCCCATCCTGAACAATCTGA |
| | AGCTGCTGCACCGGTACAGCGGCGTGTACGGCGTTAACACCGTGCAGAATGAGCTGCTGACCCTGATCCAGAAGTCC |
| | GGCAGCATCAAGCTGAACGACGTGTCCTCTCAAGTGGGCCTGAGCATCGGAGTGGCCAGAAGCTTTCTGTACGCCCT |
| | GATTCACAAGGGCTTCGTGAAGGCCGACCTGGGAAGAGATGACCTGACCATCAATCCCACACTGTGGCCCGTGTACG |
| | ACTGA (SEQ ID NO: 309) |
| tnsB | ATGATCGACTTCTACGACGAGTTCGACGAGTCTATCGCCCCTAACAAGCCCAAGACACCCATCCAGTACGTGAAGCT |
| | GGAAGATGCCAACCTGATCAAGCGCGACCTGGATACCTTTCCTGACTTCCTGAAAGAGCAGGCCCTGGATAAGTACG |
| | AGCTGATCTCCCAGATCGACAAAGAGATCGAAGGCGGCTGGACCAAGAAGAACATCGACCCCATCCTGGAAAAGCT |
| | GTTCGACAGCAACAGCTTCAACAGACCCAACTGGCGGACAGTTGTGCGGTGGCGGAAGAAGTATATCGAGAGCAGC |
| | GGCGATCTGGCCAGCCTGGTCAATGAGAGACACAAGATGGGCAACCGCAAGAAGCGGATCAAGGGCGACGAGGCCT |
| | TCTTCGATACAGCCCTGGAAAGATTCCTGGACGCCAAGAGGCCTACCGTGTCCACCGCCTACAAGTACTACAAGGAC |
| | CTGATCATCATCGAGAACGAGAAGATCGTGGAAGGCAAGATCCCCACCGTGTCCTACACCGCCTTCAACAAGAGAAT |
| | CAAGGCCCTGCCTCCTTATCCTCTGGCCGTGGCCAGACACGGCAAGTTCATGGCTGATCAGTGGTTCGCCTACTGCAG |
| | CAGCCATCTGCCTCCAACCAGGATTCTGGAACGCGTGGAAATCGATCACACCCCTCTGGATCTGATCCTGCTGGACGA |
| | CGAGCTGCTGATCCCTCTGGGCAGACCTTACCTGACACTGCTGGTGGATGTGTTCAGCGGCTGCATCATGGGCTTCCA |
| | CCTGAGCTACAAGTGCCCCAGCTATGTGTCTGCCGCCAAGGCCATCACACACGCCATCAAGCCTAAGAGCCTGGAAT |
| | CCATCGGCATCGAGTTCCAGAACGACTGGCCCTGCTACGGCAAGATCGAGAACCTGGTGGTGGACAACGGCGCCGAG |
| | TTTTGGAGCAAGTCTCTGGAACACGCCTGTCACAGCGCCGGCATCAATATCCAGTACAACCCCGTGCGGAAGCCCTG |
| | GCTGAAGCCCTTTGTGGAACGGTTCTTCGGCGTGATCAACCAGCACTTCCTGAGCGAGCTGCCCGGCAAGACCTTCAG |
| | CAACATTCTGGAAAAAGAAGAGTACAAGAGCGAGAAGGACGCCATCATGCGGTTCAGCACCTTCGTGGAAGAGTTC |
| | CACAGATGGATCGTGGACGTGTACCACCAGGACAGCGACAGCCGGGACACAAGAATCCCCATCAGACAGTGGAAGT |
| | CCGGCTTCGATGTGTACCCTCCACTGAAGATGAAGAACGAGGAAGAGGAACGCTTCAGCGTGCTGATGCACATCAGC |
| | TCCGAGCGGACCCTGACCAGAAACGGCTTCAAGTTCGAGGAACTGATGTACGACAGCACTGCCCTGGCCGACTACCG |
| | GAAGCACTACCCTCAGAGCAAGAAAACCATCAAAAAGATCATCAAGGTGGACCCCGACGACATCAGCAAGATCTAC |
| | GTGTACCTGGAAGAACTGAACAGCTATCTGGAAGTGCCCTGCACAGACCCCAGCAGCTATACAAAGGGCCTGAGCAT |
| | CCACGAGCACAAGACCATTAAGAAGATCAACCGCGAGATCATCCGGGAAAGCAAGAACAGCCTGGGCCTCGCCAAA |
| | GCCAGAATGGCCATCCACGAACGCGTGAAGAAAGAACAAGAGTTCTTCGTGGCCAGCAAGAGCACCGCCAAGATCA |
| | GCACCGTGAAGAAGCAGGCCCAGCTGGCCGACATCTGCAATACCGGCAAGGGCACCATCCGGATCAGCAAGGATGA |
| | GACAACCAGCATGCAGCCCAACAAGAGCAACCACATCTTCGACAACTGGGACGACGACCTGGAAGCCTTCTGA (SEQ |
| | ID NO: 310) |
| tnsC | ATGAACACCCTGACCGAGATCCAGATCGAGCAGCTGCGGAAGTTCAGCGACTGCATCGTGGTGCACCCTCAGATCGA |
| | AGTGATCTTCAACGACTTCGACGAGCTGCGGCTGAACCGGAAGTTCCAGAGCGATCAGCAGTGCATGCTGCTGACCG |
| | GCGATACAGGCGTGGGAAAGTCCCACGTGATCAACCACTACAAGAAACGCGTGCTGGCCACGCAGAACTACAATCG |
| | GAGCACAATCCCCGTGCTGGTGTCCAGAATCAGCAGCGGCAAAGGCCTGGACGCCACACTGATCCAGATGCTGACAG |
| | ACCTGGAACTGTTCGGCAGCAGCCAGCGGAAGAAGAGAGGCTACAAGACCGACCTGACCAGAAAGCTGGTGGAAAG |
| | CCTGGTCAAGGCCCAGGTGGAACTGCTGATTATCAACGAGTTCCAAGAGCTGATCGAGTTCAAGTCCATCCAAGAGC |
| | GGCAGTCTATCGCCAACGGCCTGAAGTTCATCAGCGAAGAGGCCAAGGTGCCCATCGTGCTCGTTGGAATGCCTTGG |
| | GCCGAGATCATTGCCGAGGAACCTCAGTGGTCCAGCAGACTCGTGCGGAAGCGGAAGCTGGAATACTTCAGCCTGCA |
| | GCGGGACAGCAAGTACTACCGGCAGTATCTGATGGGCCTCGCCAAGAACATGCCCTTCGATGTGCCTCCAGAGCTGG |
| | AAGATAAGCACACCGCTATCGCCCTGTTCAGCGCCTGTAGAGGCGAGAACAGAGCCCTGAAACATCTGCTGAGCGAG |
| | AGCCTGAAGCTGGCCCTGACCTGCAACGAGTACCTGGAAAACAAGCACTTCATCTCCGCCTTCGACAAGCTGTACAG |
| | AAGCGGCGAGACAGACAGCACCCAGGGCAAGAAGAACCTGAAGAACCCCTTCAAGCAGGACGTGAAGGATATCGTG |
| | GTGTCCGAGATGATCGAGCACTCCAAGTACAACCCCAACGCTCTGGACCCCGAGGACATGCTGACTGGCAGAGTGTT |
| | CAGCTGA (SEQ ID NO: 311) |
| tnsD | ATGAGCTTCCTGTTCAGCCCCGAGACAAGAGCCTTCGCCGATGAGAGCCTGGAAAGCTACCTGCTGCGGATCATCAG |
| | CGAGAATTTCTTCGAGAGCTACGAGGAACTGAGCCTGGCCATCAGAGAGGAACTGCACGAGCTGGACTTTGACGCCC |
| | ATGGCGCCTTTCCAATCGACCTGAAGCGGCTGAATGTGTTCCACGCCAAGCACAACAGCCACTTCAGAATGAGAGCC |
| | CTGAGCCTGCTGGAAACCCTGCTGGATCTGCCTAGACACGAGCTGCAGAAACTGGCCCTGCTGAAGTCCAACAAGAC |
| | CTTCAACACCTCTATCGCCCTGCACCGGAACGGCGTGGACATCCCTCTGAAGTTCATCCGGTACAACGGCACCGACGG |
| | CATCAGCACAATCCCTGTGTGTCCTCAGTGCCTGAGCGAGGAAGCCTACATCAAGCAGAGCTGGCACCTGAAATGGG |
| | TCAACAACTGCACCAAGCACGAGTGCGCCCTGCTGCACTACTGCCCTGAGTGTAACCTGCCTCTGAACTACATCGAGA |
| | ACGAGAGCATCACCCACTGCAGCTGCGGCTTTGAACTGAGCGCCGCCAGCACCAACAGCACCGATAAGCAGAGCATC |
| | GACGTGCTGAAGATGCTGATGCTGAACGACGCCAGCAGCGACAACCCTCTGTTCAAGAGCACCAGCATCTCCCAGAG |
| | ACTGGCCACACTGCTGTGGTATCAGGACAGATACTCTGCCGCCGACACCTTCTGCCTGAACGAGATCGCCGACTACTT |
| | CAACAAGTGGCCCGAGATCCTGTACAAAGAGCTGGATTACCTGAGCCAGCGGGCCGAGATCAAGCTGATCGACCTGT |
| | TTAACAAGACCGCCTTCCGGTTCATCTTCGGCGAGCTGATCCTGAGCGTGCCCCACAACAATCAGTCCGAGGAACAG |
| | CTGCACTTCATCCGGATCACCCTGATGGACTACCTGGTGCTGCTGGTGGAAAAGAACCCCAAGAGCAAGAAACCCAA |
| | CGTGGCCGACATGCTGGTGTCCGTGTCAGAGGTGGCCATCATCCTGGGCACAAGCCACGAACAGGTGTACCGGCTGT |
| | ACCAGGACGGCATCCTGCAGAGCGTGTTCCGGCACAAGATGAAGCAGCGGATCGACCCTCACAGCTGCGTGTTCTTT |
| | CTGCGGCAAGTGATCGAGTACAAGAGCAGCTTCGGCGTGAACAAGTCCAGAATCTACCTGAGCGCCTGGTGA (SEQ |
| | ID NO: 312) |

[0094] 27754|44|IMG_3300003980_$F_3300003980|Ga0064232_10045|134414|Ga0064 232_10045 (ID: 100)

TABLE 10

| Elements | Sequences |
|---|---|
| tnsA | ATGCGGACCAAGCTGATGAAGATGGTCATCCTGCT |
| | GATGTATATCCGGAACCTGCGGAAGCCCTCTCCAA |
| | ACAAGAACGTGTTCAAGTTCGCCAGCACCAAGGTG |
| | TCCAGCGTGGTCATGTGTGAAGGCACCCTGGAATT |
| | CGACGCCTGCTTCCACCACGAGTACAACGACCTGA |
| | TCGAGAGCTTCGGCTCTCAGCCCGAGGGCTTTAAG |
| | TACGAGTTCATGGGCAAGAGCCTGCCTTACACACC |
| | CGACGCTCTGATCAGCTACACCGACAAGACCCAGA |
| | AGTATCACGAGTATAAGCCCTACAGCAAGATCGCC |
| | TCTCCTCTGTTCCGGGCCGAGTTTGCCGCTAAAAG |
| | AGCCGCCTCTCTGAAGATGGGCATTGACCTGATCC |
| | TGGTCACCGACCGGCAGATCAGAGTGAACCCCATC |
| | CTGAACAACCTGAAGCTGCTGCACAGATACAGCGG |
| | CGTGTACGGCATCAGCAGCATCCAGAATGAGCTGC |
| | TGAGCTTCATCCACAAGAGCGGCGTGATCAAGCTG |
| | AACGACATCAGCTCCCAGATCGGCCTGCCTATCGG |
| | CAAGACCAGAAGCTTCATCTTCGGCCTGATGCACA |
| | AGGGCCTCGTGAAGGCTGATCTGGGCTGCGACGAC |
| | CTGACCAACAATCCCACACTGTGGGCCACACCTTG |
| | A |
| | (SEQ ID NO: 313) |
| tnsB | ATGGGCTACACCATGACCGATTTCTTCAACGAGTT |
| | CGACGGCAGCCTGACACCTCTGAAGCCCCAGACAC |
| | CTAAGCAGTACGTGAAGCTGGACGACAGCAACCTG |
| | ATCCAGAGAGATCTGGACACCTTCTCCGACACCTT |
| | CAAGAATCAGGCCCTGCAGCGGTACAAGCTGATCA |
| | TCAGCATCGACAAGAAGCTGAGCGCCGGCTGGACC |
| | CAGAGAAACCTGGATCCTATCCTGGACGAGATCTT |
| | CAAAGAGGACGAGCAGGCCAGACCTAACTGGCGGA |
| | CAATTGCCAGATGGCGGAAGAAGTACCTGGAAAGC |
| | AACGGCGATCTGGCCAGCCTGGTGGTCAAGAACCA |
| | CCGGATGGGCAACAGAATCAAGCGGATCGAGGGCG |
| | ACGAGAGCTTCTTCGACAAGGCCCTGGAAAGATTC |
| | CTGGACGCCAAGAGGCCTACAGTGGCCACAGCCTA |
| | CCAGTACTACAAGGACCTGATCGTGATCGAGAACG |
| | AGAGCATCGTGGAAGGCAAGATCCCCATCATCAGC |
| | TACAACGCCTTCAACAAGCGCATCAAGGCCATTCC |
| | TCCATACGCCGTGGCCGTGGCCAGACACGGAAAGT |
| | TTAAAGCCGACCAGTGGTTCGCCTACTGCGCCGCT |
| | CATGTGCCTCCAACCAGGATTCTGGAACGCGTGGA |
| | AATCGATCACACCCCTCTGGATCTGATCCTGCTGG |
| | ACGATGAGCTGCTGATCCCTATCGGCAGACCCTAC |
| | CTGACACTGCTGATCGACGTGTTCAGCGGCTGCGT |
| | GCTGGGCTTTCACCTGAGCTACAAGAGCCCCAGCT |
| | ATGTGTCTGCCGCCAAGGCCATCACACACGCCATC |
| | AAGCCTAAGAGCCTGGATGCCCTGAACATCGAGCT |
| | GCAGAACGACTGGCCTTGCTTCGGCAAGTTCGAGA |
| | ACCTGGTGGTGGACAACGGCGCCGAGTTCTGGTCC |
| | AAGAATCTGGAACACGCCTGCCAGTCTGCCGGCGT |
| | GAACATCCAGTATAACCCCGTGCGGAAGCCCTGGC |
| | TGAAGCCCTTCATCGAGAGATTCTTTGGCGTGATC |
| | AACGAGTACTTCCTGCCTGAGCTGCCCGGCAAGAC |
| | CTTCAGCAACATCCTGGAAAAAGAAGAGTACAAGC |
| | CCGAGAAGGACGCCATCATGCGGTTCAGCACCTTC |
| | GTGGAAGAGTTCCACAGATGGATCGTGGACGTGTA |
| | CCACCAGGACAGCAACAGCAGAGAGACACGGATCC |
| | CAATCAAGAGATGGCAGCAGGGCTTCGACGCCTAT |
| | CCTCCACTGACCATGAGCGAGGAAGAAGAGGCCAG |
| | ATTCGACATGCTGATGCGGATCAGCGACAGCAGAA |
| | CCCTGACCAGAAACGGCATCAAGTACCAAGAGCTG |
| | ATGTACGACAGCACAGCCCTGGCCGACTACCGGAA |
| | GCACTACCCTCAGACCAAAGAGACAATCAAGAAAC |
| | TGATCAAGGTGGACCCCGACGACATCAGCAAGATC |
| | TACGTGTACCTCGAGGAACTGGAAAGCTACCTGGA |
| | AGTGCCCTGCACCGATCCTACCGGCTATACAGATG |
| | GCCTGAGCATCTACGAGCACAAGACCATCAAGAAG |
| | ATCAACCGCGAGATCATCAGAGAGAGCAAGGACAG |
| | CCTGGGCCTCGCCAAAGCCAGAATGGCCATCCACG |
| | AAAGAGTGCGGCAAGAGCAAGAGGCTTTCATCGAG |
| | TCCAAGACCAAGGCCAAGATCACCACCGTGAAGAA |
| | ACAGGCCCAGATTGCCGACGTGTCCAATACCGGCA |
| | CCGGCACCATTAAGGTGTCCGAAAAGTCTGCCGCT |
| | CCTGTGCAGAAGAACATCTCCAACGACATCTTCGA |
| | CGACTGGGACGACGACCTGGAAGCCTTCGAATGA |
| | (SEQ ID NO: 314) |
| tnsC | ATGAATGCCCTGACCGAGCTGCAGATCGGCCAGCT |
| | GAGAAACTTCAGCGACTGCATCGTGATGCACAGCC |
| | AGATCAAGACCATCTTCAACGACTTCGACGAGCTG |
| | CGGCTGAACCGGATCTTCCAGAGCGATCAGCAGTG |
| | TATGCTGCTGATTGGCGATACCGGCGTGGGCAAGA |
| | GCCACACCATCAACCACTACAAGAAACGCGTGCTG |
| | GCCACACAGAACTACAGCCGGAATACCATGCCTGT |
| | GCTGATCTCCCGGATCTCTAGAGGCAAAGGCCTGG |
| | ACGCCACACTGATCCAGATGCTGGCTGACCTGGAA |
| | CTGTTCGGCAGCTCCCAGATTAAGAAGCGGGGCTA |
| | CAAGACCGACCTGACCAAGAAACTGGTGGAAAGCC |
| | TGATCAAGGCCCAGGTGGAACTGCTGATTATCAAC |
| | GAGTTCCAAGAGCTGATCGAGTTCAAGTCCGTGCA |
| | AGAGCGGCAGCAGATCGCCAACGGCCTGAAGTTCA |
| | TCAGCGAAGAGGCCAAGGTGCCCATCGTGCTCGTT |
| | GGAATGCCTTGGGCCGCCACAATTGCCGAGGAACC |
| | TCAGTGGGCCTCTAGACTCGTGCGGAAGCGGAAGC |
| | TGGAATACTTTAGCCTGAAGAACGACATCAAGTAC |
| | TTCCGCCAGTACCTGATGGGCCTCGCCAAGCAGAT |
| | GCCCTTCGATGAGCCTCCTAAGCTGGAAAGCAAGA |
| | ACACCACAATGGCCCTGTTCGCCGCCTGCAGAGGC |
| | GAGAATAGAGCCCTGAAACATCTGCTGTCTGAGGC |
| | CCTGAAGCTGGCCCTGAGCTGTAACGAGCACCTGG |
| | AAAACAAGCACTTCATCACCGCCTACGAGAAGTTC |
| | GACTTCTTCAATGACAAAGAGAGCCTCGAGCTGAA |
| | GAACCCCTTCGAGCAGGACGCCAAGGACATCGTGA |
| | TCTACGAAGTGATCAAGAGCAGCAGCTACAACCCC |
| | AACGCTCTGGACCCTGAGCACATGCTGACCGGCAG |
| | AAAGTTCGCCATCCTGAAGTGA |
| | (SEQ ID NO: 315) |
| tnsD | ATGGCCTTCCTGTTCAGCCCTAAGGCCAGAGCCTT |
| | TAGCGACGAGAGCCTGGAAAGCTACCTGCTGAGAG |
| | TGGTGTCCGAGAACTTCTTCGACAGCTACGAGGGC |
| | CTGAGCCTGGCCATCAGAGAGGAACTGCACGAGCT |
| | GGATTTTGAGGCCCACGGCGCCTTTCCAATCGACC |
| | TGAAGAGACTGAACGTGTACCACGCCAAGCACAAC |
| | AGCCACTTCCGGATGAGAGCCCTGGGCCTGCTGGA |
| | AACACTGCTGGACCTGCCTAGATACGAGCTGCAGA |
| | AACTGGCCCTGCTGAAGTCCGACATCAAGTTCAAC |
| | AGCAGCGCCGCTCTGTACAAGAACGGCGTGGACAT |
| | CCCTCAGAAGTTCATCCGGTATCACCCCGAGGACG |
| | CCGTGGATAGCATTCCTGTGTGTCCTCAGTGCCTG |
| | GTGGAAGAGGCCTACATCAAGCAGAGCTGGCACAT |
| | CAAATGGGTCAACGCCTGCGTGAAGCACCAGTGTG |
| | CCCTGCTGCACAATTGCCCTGAGTGCTGCGCCCCT |
| | ATCAACTACATCGAGAACGAGAGCATCACCCACTG |
| | CAGCTGCGGCTTCGAACTGACCTGTGCCAGCACAA |
| | GCCCTGCCAACACACTGAGCATCGAGCACCTGAAC |
| | GAGCTGCTGGACAAGAGCGAGCGGAACGACAGCAA |
| | CCCTCTGTTCAACAACACCACACTGACCGAGAGAT |
| | TCGCCGCACTGCTGTGGTATCAAGAGCGGTACAGC |
| | CAGACCGACAACTTCTGCCTGGATGACGTCGTGGG |
| | CTACTTCAACAAGTGGCCCACCGCCTTCTACAAAG |
| | AGCTGGACGAGCTGAGCAAGAACGCCGAGATGAAG |
| | CTGATCAACCTGTTTAACAAGACCGAGTTCAAGTT |
| | CATCTTCGGCGACGCCATCCTGAGCTGCCCCAACA |
| | CACAGAAGCAGAAAGAGCTGCACTTCATCTACAGA |
| | GCCCTGCTGGACTACCTGGTCACCCTGGTCGAGAG |
| | CAATCCCAAGGCCAAGAAACCCAACGCCGCCGATC |
| | TGCTGGTGTCTGTGCTTGAAGCTGCCACTCTGCTG |
| | GGCACCTCTGTGGAACAGGTGTACAGACTGTACCA |
| | GGACGGCATCCTGCAGACCGCCTTCCGGCACAAGA |
| | TGAACCAGCGGATCAACCCCTACAAGGGCGTGTTC |
| | TTCCTGCGGAGAGTGATCGAGTACAAGACCAGCTT |
| | CGGCAACGACAAGACCCGGATGTACCTGAGCGCTT |
| | GGTGA |
| | (SEQ ID NO: 316) |

[0095] 32450|4802|Marsedof8samples_$F_3300010430|118733_100004803|40162|Ga01 18733_100004803 (ID: 101)

TABLE 11

| Elements | Sequences |
|---|---|
| tnsA | ATGTACATCCGGAACCTGCGGAAGCCCTCTCCAAA |
| | CAAGAACGTGTTCAAGTTCGCCAGCGCCAAGGTGT |
| | CCGAGACAATCATGTGCGAGAGCACCCTGGAATTC |
| | GACGCCTGCTTCCACCACGAGTACAACGAAACCAT |
| | CGAGACATTCGGCAGCCAGCCTAAGGGCTTCTACT |
| | ACTGCTTCGAGGGCAAGAGACTGCCCTACACACCC |
| | GATAGCCTGCTGCACTACATCGACGGCACCACCAA |
| | GTTCCACGAGTATAAGCCCTACAGCAAGACCTTCG |
| | ATCCCATCTTCCGGGCCAAGTTCGTGGCCAAGAAA |
| | GAGGCTGCTAGAGCCCTGGGCACAGAGCTGATCCT |
| | GGTCACCGACAAGCAGATCAGAGTGAACCCCATCC |
| | TGAACAACCTGAAGCTGCTGCACCGGTACAGCGGC |
| | ATCTACGGCGTGACCGATATCCAGAGAGAACTGCT |
| | GCAGCTGATCCGGAAGTCCGGCAAGGTTCAGCTGC |
| | ACGATATCGCCAGCGAGTACAAGCTGCCTATCGCC |
| | GAGACAAGAAGCTTCCTGTACAGCCTGATCAACAA |
| | GGGACTGATCAAGGCCGACCTGAACCAGGACGACC |
| | TGAGCTGCAATCCTAGCGTGTGGTGCAACGCCTGA |
| | (SEQ ID NO: 317) |
| tnsB | ATGATGGACTTCGAGGACGAGTTCACCGTGTCCAC |
| | CAGCGTGAAGAAGCCTGAGACACCCGCTCAGTACG |
| | TGAAGCTGGACGATAGCGAGCTGGTCAAGCGCGAC |
| | CTGGATACCTTTCCTGACTTCCTGAAAGAGAAGGC |
| | CCTGGACAAGTACAAGCTGATCTCCTTCATCGAGC |
| | AAGAGAACAGCGGCGGCTGGACCCAGAAGAAGCTG |
| | GATCCCATCCTGGATAAGCTGTTCGAGGGCAACAG |
| | AGACAAGCGGCCCAATTGGAGAACAGTCGTGCGGT |
| | GGCGGAAGTCCTACATCGACAGCAATGGCGATCTG |
| | GCCAGCCTGGTGGTCAAGAGACACAAGATGGGCAA |
| | TCGCAACAAGAGAGTGGAAGGCGACGAGGTGTTCT |
| | TCGAGAGAGCCCTGAGCAGATTCCTGGACGCCAAG |
| | AGGCCTAAAGTGACCACCGCCTACCAGTACTACAA |
| | GGACGCCATCACCATCGAGAACGAGACAATCGTGG |
| | ACGGACAGATCCCCATCATCAGCTACACCGCCTTC |
| | AACCAGCGGATCAAGAGCCTGCCTCCTTATCCTAT |
| | CGCCGTGGCCAGACACGGCAAGTTCAAAGCCGATC |
| | AGTGGTTCGCCTACTGCAGCTCTCACATCCCTCCA |
| | ACCAGAATCCTGGAACGCGTGGAAATCGATCACAC |
| | CCCTCTGGACCTGATCCTGCTGGATGACGAGCTGC |
| | TGATCCCTCTGGGCAGACCCTACCTGACACTGATC |
| | GTGGATGTGTTCAGCAACTGCGTGCTGGGCTTCCA |
| | CCTGAGCTATAAGGCCCCTAGCTATGTGTCTGCCG |
| | CCAAGGCCATTGTGCACGCCATCAAGCCTAAGACA |
| | CTGAGCAACGTGGGCATCGAGCTGCAGAACGACTG |
| | GCCTTGCTATGGCAAGTTCGAGACACTGGTGGTGG |
| | ACAACGGCGCCGAGTTTTGGAGCAAGTCTCTGGAC |
| | CACGCCTGCAAAGAGGCCGGCATCAACATCCAGTA |
| | CAACCCCGTGCGGAAGCCCTGGCTGAAGCCCTTCG |
| | TGGAAAGATTCTTCGGGATGATCAACCAGTACTTC |
| | CTGACCGAGCTGCCCGGCAAGACCTTCAGCAACAT |
| | CCTGGAAAAAGAGGACTACAAGCCCGAGAAGGATG |
| | CCATCATGCGGTTCAGCGTGTTCGTGGAAGAGTTC |
| | CACAGATGGATCGTGGACATCTACCACCAGGACAG |
| | CGACAGCCGGGACACACGGATCCCTATTAAGCAGT |
| | GGCAGCACGGCTTCGATATCTACCCCAGCCTGCAG |
| | ATGGGCGTCGAGGATGAGGAACGGTTCAACGTGCT |
| | GATGGGCATCACCGACGAGCGGAGACTGACCAGAA |
| | ACGGCTTCAAGTTTGAGGAACTGATGTACGACAGC |
| | ACAGCCCTGGCCGACTACCGGAAGCACTACCCTCA |
| | GACCAAGGATACCATCAAGAAGCTGATCAAGATCG |
| | ACCCCGACGACCTGAGCAGCATCCACGTGTACCTG |
| | GAAGAACTGGAAGGCTACCTGAAGGTGCCCTGCAC |
| | CGATACCACAGGCTATACACTGGGCCTGAGCCTGC |
| | ACGAGCACAAGATCACCAAGAAGATCAACCGCGAG |
| | ATCATCAGAGAGAGCAAGGACAACCTGGGCCTCGC |
| | CAAAGCCAGGATGGCCATTCATGCCAGAGTGCAGC |
| | AAGAGCAAGAGCTGTTCAACGAGTCCAAGACCAAG |
| | GCCAGACTGAGCGGCGTGAAAAAGCAGGCCCAGCT |
| | GGCCGACATCAGCAATACCGGACAGGGCACCATCA |
| | AGCTGGAAAAGTCTAACAGCCCCAGCGTGATCACC |
| | AACAAGCCTGAGCCAAACATCAGCGATATCCTGGA |
| | CAACTGGGACGACGACATCGAGGGCTTCGAGTGA |
| | (SEQ ID NO: 318) |
| tnsC | ATGAGCACACTGACAGCCCTGCAGATGGAACTGCT |
| | GCGGAGATTCAGCGACTGCTTCGTGATGCACCCTC |
| | AGGCCAGAACCATCTTCAACGACTTCGACGACCTG |
| | CGGCTGAACCGGAACTTCCAGAGCGATCAGCAGTG |
| | CATGCTGCTGACCGGCGATACAGGCGTGGGAAAGA |
| | GCCACCTGATCAACAACTACAAGAAACGCGTGCTG |
| | GCCTCTCAGATCTACAGCAGAACCAGCATGCCCGT |
| | GCTGGTCACCAGAATCAGCAGCCACAAAGGCCTGG |
| | ACGCCACACTGAGACAGATGCTGGCCGACCTGGAA |
| | AGCTTTGGCAGCCAGCAGAGAAAGGGCCCCAATTA |
| | CAAGATCGACCTGAAGAACCAGCTCGTGAAGAACC |
| | TCGTGCGGGCCAATGTCGAGCTGCTGATCTTCAAT |
| | GAGTTCCAAGAGCTGATCGAGTTCAAGACCCCTAA |
| | AGAGCGGCAGACAATCGCCAACGAGCTGAAGTTCA |
| | TCAGCGAGGAAGCCAGAATTCCCATCGTGCTCGTG |
| | GGCATGCCTTGGACAGAACAGATCGCCGAGGAACC |
| | CCAGTGGTCCAGCAGACTGATCCGGAAGCGGAACC |
| | TGGAATACTTCAGCCTGCAGAAGGACAGCAAGTAC |
| | TACCGGCAGTACCTGATCGGCCTGGCCAAGTACAT |
| | GCCCTTCGACGAGCCTCCAAAGATCGAGGACAAGC |
| | ACATTGCCATTCCTCTGTTCGCCGCCTGCAGAGGC |
| | GAGAATAGAGCCCTGTCTCATCTGCTGAGCGAGAC |
| | ACTGAAGCTGGTCATGGTCAACGGCGACAGAAGCC |
| | TGGACATCAGACATCTGGCCCAGACCTACAAGAAG |
| | CTGTACGAAGGCCAAGGCAGCGGCAGCACCAAGGT |
| | GTTCTTCAACCCCTTCCTGGAACCTCTGGACAAGG |
| | TGCTGATCTCCGAGGTGGTCAAGCCCAGCAGATAC |
| | AACCCCAACGCCATGACACCCGACGACATGCTGAT |
| | CAAGAGAGAGTTCAGCACCCCTAGCACACTGGACC |
| | AGCTGCTGAGCAAGTGA |
| | (SEQ ID NO: 319) |
| tnsD | ATGGCCTTCCTGTTCAGCCCTAACGCCAGAGCCTT |
| | TAGCGACGAGAGCCTGGAAAGCTACCTGCTGAGAG |
| | TGGTGGCCGAGAACTTCTTCGACAGCTACCAGCAG |
| | CTGAGCCTGGCCATCAGACTGGAACTGCACGAGCT |
| | GGATTTTGAGGCCCACGGCGCCTTTCCAATCGAGC |
| | TGAAGCGGCTGAACGTGTACCACGCTCAGCACAAC |
| | AGCCACTTCCGGATGAGAGCCCTGAGCCTGCTGGA |
| | ATCCCTGCTGGATCTGCCTCCTCACGAGCTGCAGA |
| | AACTGGCCCTGCTGAGGTCCAACAGAACCTTCGTT |
| | GGCGGCATGAGCGCCGTGCACAGAAACGGCATCGA |
| | TATCCCTCTGAGCTTCATCAGAAACGCCGGCGAGA |
| | ATGGCATCGAGAGCGTGCCAATCTGCCCTCAGTGC |
| | CTGAAAGAGAAGCCCTACATCCGGCAAGTGTGGCA |
| | CCTGAAGCCTGTGGAAGTGTGCGCCAAGCACTCTT |
| | GCGAGCTGCTGCACCAGTGTCCTGAGTGCCAGCAG |
| | CCTATCAACTACATCGAGAACGAGTCTATCGCCCA |
| | CTGCAGCTGCGGATTCGAACTGGCTACAGCCCCTA |
| | GCGTGAAGGCCGATTCTCAGGCTGTGCTGCTGAGC |
| | AGAAGCCTGTTTGACGGCGACGCCCTGAGCAACAA |
| | CCCTCTGCTGTTTATGGGCACCAGCGCCACACACA |
| | GATTCGCCGCTCTGCTGTGGTATCAGAAGCGGCAC |
| | GCCAAGAACACCGAGTGCATGACACACGGCAGCGT |
| | GGGCTACTTCGAGGATTGGCCTACCAGCTTCTACC |
| | GCGAACTGGACGCTGTGACAACAGGCGCTGAAGTG |
| | CGGCTGATCGACCTGTTCAACCGGACCAGCTTCCG |
| | GTCCATCTACGGCGAGCTGATCCTGGACTCTCAGT |
| | GTCTGCTGCCCGAGGACAAAGAGCCCCACTTCATC |
| | TATCTGGCCCTGATGGAGTACATCAGCAAGCTGGT |
| | GGAATCTCACCCCAAGAGCAAGAAACCCAACGTGG |
| | CCGACATGCTGGTGTCCGTGGCTGAAACAGCAGTG |
| | CTGCTGTCCACCACACACGAACAGGTGTACCGGCT |
| | GTACCAGGATGGCGTGCTGACAGCCGGCTTCAAGC |
| | AGAAGATCCGGACCAGAATCGGACCCCACATCGGC |
| | GTGTTCTACCTGCGGCAAGTGATCGAGTACAACAC |
| | CAGCTTCGGCAACGACAAGCAGGGCATGTACCTGA |
| | GCGCTTGGTGA |
| | (SEQ ID NO: 320) |

[0096] 1697|37|MTLE01.1|MTLE01000038.1|100866|Biofilm (ID: 102)

TABLE 12

| Elements | Sequences |
|---|---|
| tnsA | ATGTACAGAAGGCACCTGGGCCACAGCAGAGTGAA |
| | GAACCTGTTCAAGTTCGTGTCCGCCAAGATGGACA |
| | CCGTGTTCACCGTGGAAAGCGCCCTGGAATTCGAC |
| | GCCTGCTTCCACCTGGAATACTCCCACGACATCAC |
| | CAGCTACGAGGCCCAGCCTGAGGGCTTCTTCTACC |
| | AGTTCAACGGCAGACCCTGTCCTTACACACCCGAC |
| | TTCAAGATCAACCACGCCGTGAACGGCATCCAGTT |
| | CCTCGAGATCAAGCCCATCGAAAAGACCAACGACG |
| | CCGACTTCATCGAGCGGTTCAAGGCCAAGAGAACC |
| | CAGAGCACCCAGAACGGCCTGCCTCTGATCCTGGT |
| | CACCGAGAAGCAGATCAGAATCAACCCCATCCTGT |
| | ACAACCTGAAGCTGCTGCACAGATACAGCGGCAGC |
| | AAGCACCTGACCAGCGTGCAGATCTACCTGCTGAG |
| | CGAAGTGAAGAAGCTGGGCAAAGTCTCCATCGAGT |
| | TCCTCATCAACAACATCAAGACGAACGAGGACAAC |
| | ATGTTCAGCCTGATCCTGAACCTGCTGGCCAAGGG |
| | CTACCTGCGGAGCAACATCACCGACAACATCTTCA |
| | ACATGAACACCACCGTGTGGTGCAAAGAGTGA |
| | (SEQ ID NO: 321) |
| tnsB | ATGAACCAGAACGACGGCGCCCAAGAGTTCGGCAT |
| | CTTCCAGGACGAGTTCCCCGACGCCACCAACGAGG |
| | AACTGACCAAGGACAAGAAACTGCAGCCCGTGTTC |
| | ATCAAGCGCGACCTGGATAGCTTCAGCGAGGACAT |
| | GAAGGCCCTGGCCATCTACCGGCTGAACTACATCC |
| | AGTGGATCCAGAGCAACATCTGCGGCGGCTGGACC |
| | CAGAAAAACCTGGTGCCTCTGATCGAGAAGGCCAA |
| | GGATGAGCTGGGAGAGCCTGCTCCTGAATGGCGGA |
| | CACTTGCTAGATGGTGGTCCCGGTACAAGAAAAGC |
| | GGCTTCAAAGTGACCTCTCTGATCCCTCAGCACAA |
| | GAACAAGGGCAACAGAAAGCCCCGCTTCGACAACA |
| | TCGAGGAAGAACTGGCCCAGAACGCCATCACCGAG |
| | TACCTGGACGAGAAGAAGCCCTCTATCGCCAGCGT |
| | GTACCAGGACTACAAGGACGACATCATCCTGCAGA |
| | ACGAGTACCGGACCGACCTGAAGAAAACCATCAAG |
| | CCTATCAGCTACCAGGGCTTCTGCAAGAAGATTAA |
| | GAAGATCAGCACACACGCCCTGATCAGCGCCCGGA |
| | AGGGCAAATATGAGGCCGAGCTGAACTTCAGATAC |
| | GTGGCCAGCCACAAGCCTCCAACCAGAGTGCTGGA |
| | AAGAGTGGAACTGGATCACACCCCTATCGATATCA |
| | TTCTGCTGGACGACGAGCTGCTGATCCCACTGGGC |
| | AGAGCCTATCTGACCCTGCTGATCGACAGCTACAG |
| | CCACTGCATCCTGGGCTTCAACCTGGGCTTTAACG |
| | AGCCCGGCTTTTACCCCGTGCGGAACACACTGCTG |
| | CACGCCTTCAAGCCCAAGACCTACATCCGGGATCA |
| | GTACCCCGACCTGATCCACGATTGGCCTCACCACG |
| | GAAAGCCCGAGACAATCGTGGTGGACAACGGCGTG |
| | GAATTCTGGGGCCAAGACCTGGAACAGACCTGCAA |
| | AGAACTGCACATCAACGTGCAGTACAACCCTGTGC |
| | GCAAGCCCTGGCTGAAGCCTCTGGTGGAAAGAAGC |
| | TTCGGCATCATCAACAGCAAGGTGCTGGATCAGAT |
| | CCCCGGCAAGACCTTCAGCAGCATCCTGAAGAGAT |
| | TCGACTACGACCCCGTGAAGGACGCCGTGTTCAGA |
| | TTCAGCAGCTTCATCGAGCATCTGCACGAGTGGAT |
| | CATCGACGACTACCACTTCAGCCCCGACAGCCGGA |
| | AGCGGTACATCCCTTATCTGCTGTGGCAGACAGGC |
| | GCCAGCGAGTTCCCTCCAAAGCAGTTCACCACAGA |
| | GGAACAGCAAGAGCTGGACGTGATCATCAGCTTCA |
| | CCGACAAGCGGACCCACAGCACAGGCGGCATCGAT |
| | ATCCACAGCCTGCGGTACAACAGCGAGATGCTGGC |
| | CGAGTTCCGGAAGATGTACGACGAGAAGCAGCTCA |
| | AGACCAAAGTGCTGGTCAAGACAAACCCCAACGAC |
| | ATCAGCCATGTGCACGTGTTCATTGAGAGCATCGG |
| | CAAGTACATCAAGGTGCCCTGCATCGACGCCGTGG |
| | GCTACACATCTGGACTGTCTCTGCAGCAGCACAAA |
| | ATCAACCTGCGGCTGCAGCATGAGTACATCGACAA |
| | GAGCACCGACATCGTGGCCCTGGCTAAAGTGCGGC |
| | GGAAGCTGAAAGAGAGAATCCAGAGAGAGATCGAC |
| | GAGATCACCAGCAGCAGAAAGAAGCACACCCTGAA |
| | GCACGCCAGCAGACTGGCCAAATACCAGGGCGTTA |
| | GCTCCCAGCAGAACAGCACAATCGCCGAGAACGAC |
| | TTCAGCGCCATGCAGAGCAGCCAGAACAAGGATGC |
| | CATCAAGAACATCAGCGACACCAAGTACAACACCG |
| | ACGAGTGGGAAGATTTCGTGTCCAAGCTGGACCCC |
| | TACTGA |
| | (SEQ ID NO: 322) |
| tnsC | ATGGGCAGATTCTGCATCGAGATCGGCAGCCTGCT |
| | GATGAACCAGCTGAGCGACAAGAACCAGCAGAAAC |
| | TGCTGCTGTTCATCCAGTGCTTCGTGGAAACCCCT |
| | ATGGCCAAGCTGATCTTCGACGACTTCGACCGGCT |
| | GCGGTACAACCAGAAGTTTGGCGGAGAGCAGCAGT |
| | GCATGCTGATTACTGGCGACGCCGGCTGTGGCAAG |
| | AGCAGCATCATCAACCACTACAAGCAGCAGTACCC |
| | CAACCAGCTGCAGGCCGGCTTCATCAACAATCCCG |
| | TGCTGGTGTCTCGGATCCCCAGCAAGCCTACACTG |
| | GAAAGCACCATGATCGAGCTGCTGAGAGATCTGGG |
| | CCAGTTCGGCAGCAGCCTGAGAAAGCACATCAGCA |
| | ACGACAAGAGCCTGACCGAGAGCCTGATCACCTGT |
| | CTGAAGAAGTGCCGGACCGAGCTGATCATCATCAA |
| | TGAGTTCCAAGAGCTGATCGAGAACAAGACCAGAG |
| | AGAAGCGGAACCAGATCAGCAACCGGCTGAAGTTC |
| | ATCTCCGAGGAAGCTCAGATCCCCATCGTGCTCGT |
| | GGGAATGCCTTGGGCCGTGAAGATTGCCGAGGAAC |
| | CACAGTGGGCCAGCAGACTGCTGATCAGAAGGCAG |
| | ATCCCCTACTTCAAGCTGTCCGAGAATCCCGAGAA |
| | CTTTATCCGGCTGCTGATGGGCCTCGCCAAGTACA |
| | TGCCTTTCGCCATCAAGCCCAAGCTGGAAGAGAAG |
| | CACAGCACATACGCCCTGTTCAGCGCCAGCTCTGG |
| | CTGTCTGAGAACCCTGAAGCACTTCCTGGACGAGA |
| | GCGTGAAGCAGGCCCTGATCGTGGATGCCGAGACT |
| | CTGGCCAATGAGCACATGGCCAAAGCCTTCGCCAT |
| | CTATCACCCCGAGGAAATCAACCCATTCCTGCAGC |
| | CTATCGACGAGATCTGTGCCCGGGAAGTGAAGAAG |
| | TACAGCTACTACGACGTGGACGCCCACGAGGACGA |
| | ACAGTTGAGCCCTCTGCAGTACACCGACAAGCTGA |
| | GCATTGGACAGCTGCTGAAGCTGCGGTGA |
| | (SEQ ID NO: 323) |
| tnsD | ATGCAGCTGCTCGTCAGACCTGCTCACCACGCCGA |
| | TGAGAGCCTGGAAAGCTACCTGCTGAGACTGAGCC |
| | AAGAGAACGGCTTCAGCAGCTACACCGAGATGAGC |
| | ACCGTGCTGAAGCTGTGGCTGCAGAGCCACGATCA |
| | TGATGCCGGCGGAGTGTTCCCTATCGAGCTGAGCA |
| | TGGTCAACGTGTACCACGCCAACAGAAGCAGCAGC |
| | TTCCGGATCAGAGCCCTGAGGCTGATCGAGCACCT |
| | GACCGAACAGACCCCTCTGAAGCTGGTGGAACTGG |
| | CCCTGGTGCACAGCTCTGCCCACTTCGGCTCTAAC |
| | ATCAAGGCCGTGCACAGAACCGGCGTGGACGTGCC |
| | AAAGCAGTTCCTGAGAACCCACAGCATCCCTGTGT |
| | GCCCCAAATGTCTGCAGGCCGACGGCTACATCAGA |
| | CAGCTGTGGCACTACCAGCCTTACACCGCCTGTCA |
| | CATCCACCACTGCCAGCTGACCGATCACTGTCCTG |
| | CTTGTGGCGCCGAGCTGGACTACCTGAAGAACAAG |
| | AGCATCGAAGTGTGCGAGTGCGGCTTCCACCTGTG |
| | CTACGCCAAGTGTATCGAGCCCAGCGACGAGCAGA |
| | TCAAGCTGAGCCAGCTGATCGCCGAGTGTCCCTTC |
| | GAGAACAGCACCAATCCTCTGCTGGCCTCTCAGAA |
| | CCTGAGCTTCAGATTCGGCGCCCTGTTCTGGTACT |
| | TCAACCGGTACAAACAGCAGCAGACCAGCAACGAC |
| | GGCATCAGCGAGGCCCTGAATAGCGCCATCACCTA |
| | CTTCGAGGACTGGCCCGACAACTTCTTCGCCGAAC |
| | TGGAACAGCAGATTGAGCACTTCTACCAGGTCCAG |
| | ATCAAGAAAGTGAACCAGACCGCCTTCTACGAGGT |
| | GTTCGGCAGCCTGCTGACCGACTGTAGCAGACTGC |
| | CTATGAGCGACCTGAGCCACAACTTCATCCTGAAA |
| | ACCGTGATCGACTTCTTCGTGCACCAAGTGGAAAC |
| | AAACCCCAAGAGCAAGAAGGCCAACATCGGCGACG |
| | TGCTGGTCACCCCTGAAGAAGCTGCACATCTGCTG |
| | AGCACCGACATTGAGCAGATCTACCGGCTGCACCA |
| | AGAGGGCTTCATCACCCTGGCCATCACACCCAGCA |
| | CAAAGTGGCACATCAGCGCCTACCTGCCTATCCTG |
| | TACCTGCGGCAAGTGATGGAACTGCGGCTGGCCAG |
| | AATCCACAGCCAGAACAATGTGTACGAGACATACC |
| | TGAGCGCCTGGTGA |
| | (SEQ ID NO: 324) |

[0097] 6215|1|OJBC01.1|OJBC01000002.1|299655|seawater (ID: 103)

TABLE 13

| Elements | Sequences |
|---|---|
| tnsA | ATGTACATCCGGAACCTGCGGAAGCCCTCTCCAAA |
| | CAAGAACGTGTTCAAGTTCGCCAGCGCCAAGATCA |
| | ACAACGTGATCATGTGCGAGAGCACCCTGGAATTC |
| | AACGCCTGCTTCCACCACGAGTACAACGACGAGAT |
| | CGAGAGCTACGGCAGCCAGCCTAAGGGCTTTAAGT |
| | ACGAGTTCAACGGCAAGAACCTGCCTTACACACCC |
| | GACACACTGATCATCTACAAGAACGGCAACGAGAA |
| | GTACCATGAGTACAAGCCCTTCAGCAAGATCAGCA |
| | GCCCTCTGTTCAGAGAGAAGTTCAAGGCCAAGAAG |
| | CAGGCCAGCCTGATCCTGGGCAGAGAGCTGATCCT |
| | GATCACCGACAAGCAGATCTGTGTGAACCCCATCC |
| | TGAACAACCTGAAGCTGCTGCACCGGTACAGCGGC |
| | ATCTATGGCGTGAACGCCGTGCAGAAAGAGCTGCT |
| | GAATCTGATCAAGAAGTCCGACGTCATCAAGTTCA |
| | ACGACGTGTCCAGCCAGCTGGGCCTGTCTATTGGA |
| | GAGGCCAGAAGCTTCCTGTACGCCCTGATCCACAA |
| | GGGCTTCGTGAAGGCCGATCTGAGCCACGACGACC |
| | TGACCAACAATCCCACACTGTGGGCCGCCTACGAC |
| | GGCTTTTAA |
| | (SEQ ID NO: 325) |
| tnsB | ATGACCGGCTTCAACGACGAGTTCGACGAGAGCAT |
| | CGTGCCCAACAAGCCCAAGACACCCATCCAGTACA |
| | TCCGGCTGGAAGATGCCAACCTGATCAAGCGCGAC |
| | CTGGACACACTGCCCGAGGCTCTGAAGAACAACAC |
| | CCTGGACAAGTACAAGATCATCAGCTATATCGCCA |
| | AAGAGCTGACCGAAGGCTGGACCCAGAAGAACATC |
| | GACCCCATCCTGGATAAGCTGTTCGACAACGACGA |
| | CAAGAAGCGGCCCAACTGGCGGACAATCGTCAGAT |
| | GGCGGAAGAAGTACAACGAGAGCAACGGCGACCTG |
| | ACCAGCCTGATCTCTGAGCACCACAAGATGGGCAA |
| | CAGAAAGAAGCGGATCAGCGGCGACGAGGTGTTCT |
| | TCGACAAGGCCCTGGAACGGTTCCTGAACGCCAAA |
| | AGACCTACCGTGTCCACCGCCTACCAGTACTACAA |
| | GGACCTGATCATCATCGAGAACCAGCACCTGTTCG |
| | AGAACAAGATCCCCACCATCAGCTACGTGGCCTTC |
| | AACAAGAGAATCAAGAGCCTGCCTCCTTACAAGGT |
| | GGCCGTGGCCAGACACGGCATCTTTAAAGCCGCTC |
| | AGTGGTTCGCCTACTGCGGCGCTCATAACCCTCCA |
| | ACCAGAATCCTGGAACGCGTGGAAATCGATCACAC |
| | CCCTCTGGATCTGATCCTGCTGGACGACGAGCTGC |
| | TGATCCCTATCGGCAGACCCTACCTGACACTGCTG |
| | ATCGACGTGTTCAGCGGCTGCATCATGGGCTTCCA |
| | CCTGAGCTACAAGTGCCCCAGCTATGTGTCTGCCG |
| | CCAAGGCCATCTCTCACGCCATCAAGCCTAAGAGC |
| | CTGGACAGCATCGGCATCGAGCTGCAGAACAACTG |
| | GCCCTGCTACGGCAAGATCGAGAATCTGGTGGTGG |
| | ACAACGGCGCCGAGTTCTGGTCCAAGTCTCTGGAA |
| | CACGCCTGTCAGAGCGTGGGCATCAACATCCAGTA |
| | TAACCCCGTGCGGAAGCCCTGGCTGAAGCCCTTCG |
| | TGGAAAGATTCTTCGGCGTGATCAACCAGTACTTC |
| | ATCAGCGAGCTGCCCGGCAAGACCTTCAGCAACAT |
| | CCTGGAAAAAGAAGAGTACAAGCCCGAGAAGGACG |
| | CCATCATGCGGTTCAGCACCTTTGTGGAAGAGTTT |
| | CACCGGTGGATCGTGGACATCTACCACCAGGACAG |
| | CGACAGCCGGGACACAAGAATCCCCATCAAGAAGT |
| | GGCAGACCGGCTTTGAGGTGTACCCTCCTCTGGAA |
| | ATGAATCAAGAAGAGGAAGAGAAGTTCAGCATCCT |
| | GATGAACATCAGCGACGAGCGGACCCTGACCAGAA |
| | ACGGCTTCAAGTTCGAGGAACTGATGTACGACAGC |
| | ACAGCCCTGAGCGAGTACCGGAAGCACTACCCTCA |
| | GACCAAAGAGACAATCAAGAAAATCATCAAGGTGG |
| | ACCCCGACGACATCAGCAAGATCTACGTGTACCTG |
| | GAAGAACTGAACAGCTACATCGAGGTGCCCTGCAC |
| | CGATCCTACCGGCTATACAAAGGGCCTGAGCATCC |
| | ACGAGCACAAGACCATCAAAAAGATCAACCGCGAG |
| | ATGATCCGGGGCAGCAAGGATGTGCTGGGACTTGC |
| | CACAGCCAGAATGGCCATCCACGAAAGAGTGAAGC |
| | AAGAGCAAGAGCTGTTCATCACCAGCAAGAACAAG |
| | CGGAAGATCAGCTCCGTGAAGAAACAGGCCCAGCT |
| | GGCCGACGTGTCCAATACCGGAACCGGCACAATCA |
| | AGGTGTCCGAGCAGAAAAGCACCACCAAGCAAGAG |
| | AACATCTCCAACGACATCCTCGAGAACTGGGACGA |
| | CGACCTGGAAGCCTTCGAGTGA |
| | (SEQ ID NO: 326) |
| tnsC | ATGAACACCCTGACCGAGACACAGATCGAGCAGCT |
| | GCGGCAGTTCAACGACTGCATCGTGGAACACCCTC |
| | AGATCAAGAGCATCTTCAACGATTTCGACGAGCTG |
| | AGACAGAACCGGCTGTTTCAGCTGGACCAGCAGTG |
| | CATGCTGCTGAGCGGAGATGCTGGCGTGGGCAAGA |
| | GCCACATCATCAACCACTACCGGAAGAGAGTGCTG |
| | GCCAACCAGAACTACAGCAGAAGCACAATCCCCAT |
| | CCTGATCAGCCGGATCAGCAAAGGCAAAGGCCTGG |
| | AAGCCACACTGATCCAGGTGCTGGCTGACCTGGAT |
| | CTGTTTGGCAGCGAGCAGCGGAAGAAGCGGGGCTA |
| | CAAGACCGACCTGACCAAGAAGCTGATCGAGAGCC |
| | TGATCAAGGCCCAGGTGGAACTGCTGATCATCAAC |
| | GAGTTCCAAGAGCTGATTGAGTTCAAGAGCCGGCA |
| | AGAGCGGCAGCACATTGCCAACGAGCTGAAGCTGA |
| | TTAGCGAAGAGGCCAAGGTGCCCATCGTGCTCGTG |
| | GGAATGCCTTGGGCCGAACTGATTGCCGAGGAACC |
| | TCAGTGGTCCAGCAGACTCGTGCGGAAGAGAAAGC |
| | TGAGCTACTTCAGCCTGAAGAACGACAAGAACTAC |
| | TTCATCCGGTACATCATGGGCCTCGCCAACAAGAT |
| | GCCCTTCGAGGAACCACCTACACTGGGCGATAAGC |
| | AGACCGCCACCGCCATCTTTTCTGCCTGTAGAGGC |
| | GAGAACCGCAGCCTGAAACATCTGCTGTCCGAGTC |
| | TCTGAAGATCGCCCTGCTGAGCAACGAGAACCTGG |
| | AAATCAAGCACCTGGCTCTGGCCTTCGACAAGCTG |
| | GAACTCCTGGGAAAAGAGGCCCAGCGGCAGAACAA |
| | GAAGAAAGAGGGCAAAGAGAAGTCCGAGGACATCG |
| | TGATCGACAACCCCTTCAACCAGAGCCTGAAGGAC |
| | ATCGACATCAGCGAAGTGATCAAGCACAGCCAGTA |
| | CGCCCCTAACGCTCTGGACCCCGAGGATATTCTGA |
| | CCGGCAGATTC |
| | (SEQ ID NO: 327) |
| tnsD | ATGGCCTTCCTGTTCAGCCCTAAAGTGCGGGCCTT |
| | CAGCGACGAGACACTGGAAAGCTACCTGCTGAGAG |
| | TGGTGTCCGAGAACTTCTTCGACAGCTACGAGCAG |
| | CTGAGCCTGGCCATTAGAGAGGCCCTGCACGAGCT |
| | GGATTTTGACGCCCATGGCGCCTTTCCAATCGACC |
| | TGAAGCGGCTGAATGTGTACCACGCCAAGCACAAC |
| | AGCCACTTCCGGATGAGAGCCATCGGCCTGCTGGA |
| | AACCCTGCTGGACCTGCCTAGATTCGAGCTGCAGA |
| | AACTGGCCCTGCTGAAGTCCGACAAGAAATTCAAC |
| | AGCAGCGTGGCCGTGCACCGCGACGGAATCGATAT |
| | CCCTCTGAAGTTCATCAGAAGCAACGGCGCCGACG |
| | GCGAGTGTAGCCTGCCTATTTGTCCTCAGTGCCTG |
| | GCCGAGGAACCCTACATCAAGCAGAGCTGGCACAT |
| | CCGGTGGATCAACATCTGCACAAAGCACAAGTGCA |
| | CCCTGATCCACCAGTGTCCTGACTGCAACCTGCCT |
| | ATCAACTACATCGAGAACGAGTCTATCGCCCACTG |
| | CCTGTGCGGCTTTGATCTGGCCAGCGCCACCAACA |
| | GCAACACCACCAGCATCACCGTGAAGCGGAAGGAC |
| | GCCGAGCTGATCCACAACCTGCTGAACAACGAAAC |
| | CCTGATCGACAACCCTCTGTTCCGGGAAACCACCA |
| | TCAGCCAGAGATTCGCCGCTCTGCTGTGGTATCAA |
| | GAGCGGTACAGCTGCATCGACAATTTCTGCCTGAA |
| | CGACGCCGCCACCTTCTTCAGCAAGTGGCCCGAGA |
| | ACCTGTACAATGAGCTGGACCACCTGAGCAAGAAC |
| | GCCAACATGAAGCTGATCGAGATGTTCAACAAGAC |
| | CATCTTCCGGTTCATCTTCGGCGAAGTGATCCTGA |
| | GCGTGCCCCACAGCATCCAGAGAGAGGGCCAGAGA |
| | CACTTCATCCGGATCGCCCTGATTGACTACCTGAT |
| | CCGGCTGGTGGCCAACAATCCCAAGAGCAAGAAAC |
| | CCAACGTGGCCGACATGCTGGTGTCCGTGACAGAG |
| | GTGGCCATCATCCTGGGCACAAGCCACGAACAGGT |
| | GTACCGGCTGTACCAGGACGGCATCCTGCAGAACG |
| | CCTTCCGGCAGAAGATGAATAGCCGGATCGACCCT |
| | CACACCGGCGTGTTCTTTCTGCGGCAAGTGATCGA |
| | GTACAAGAGCAGCTTCGGCGACGACAAGCCCAAGA |
| | TGCACCTGTCTGCTTGGTGA |
| | (SEQ ID NO: 328) |

[0098] 39683|0|GCA_000014885.1_ASM1488v1_genomic|CP000472.1|5396476|Shewa nella (ID: 104)

TABLE 14

| Elements | Sequences |
|---|---|
| tnsA | ATGTACATCCGGAACCTGCGGAAGCCCTCTCCAAA |
| | CAAGAACGTGTTCAAGTTCGCCAGCGCCAAGGTGT |
| | CCGAGACAATCATGTGCGAGAGCACCCTGGAATTC |
| | GACGCCTGCTTCCACCACGAGTACAACGAAACCAT |
| | CGAGACATTCGGCAGCCAGCCTAAGGGCTTCTACT |
| | ACAGATTCGAGGGCAAGAGACTGCCCTACACACCC |
| | GATGCCATCCTGCACTACATCGACGGCACCACCAA |
| | GTTCCACGAGTATAAGCCCTACAGCAAGACCTTCG |
| | ATCCCATCTTCCGGGCCAAGTTCGTGGCCAAGAAA |
| | GAAGCCGCTCAGGCCCTGGGAACAGAGCTGATCCT |
| | GGTCACCGACAAGCAGATCAGAGTGAACCCCATCC |
| | TGAACAACCTGAAGCTGCTGCACCGGTACAGCGGC |
| | ATCTACGGCGTGACCGATATCCAGAGAGAACTGCT |
| | GCAGCTCGTGCGGAAGTCCGACAATATCCAGCTGG |
| | CCGATGTGGCCAGCGAGTACAATCTGCCTATCGCC |
| | GAGACAAGAAGCTTCCTGTACAGCCTGATCAACAA |
| | GGGACTGATCAAGGCCGACCTGAACCAGGACGACC |
| | TGAGCTGCAATCCTAGCGTGTGGTGTCACGCCTGA |
| | (SEQ ID NO: 329) |
| tnsB | ATGGACTTCGCCGACGAGTTTACCGAGAGCACCAG |
| | CGCCAAGAAGCCTGAGACACCAGCTCAGTACGTGA |
| | AGCTGGACGATGCCGAGCTGCTGAAGAGAGATCTG |
| | GATACCTTTCCGGACTTCCTGAAAGAGAAGGCCCT |
| | GGACAAGTACAAGCTGATCTCCTTCATCGAGCAAG |
| | AGAACAGCGGCGGCTGGACCCAGAAGAAGCTGGAT |
| | CCCATCCTGGACAGACTGTTCGAGGGCAACACCGA |
| | GAAGCGGCCCAATTGGAGAACAGTCGTGCGGTGGC |
| | GGAAGTCCTACATCGACAGCAATGGCGATCTGGCC |
| | AGCCTGGTGGTCAAGAGACACAAGATGGGCAACCG |
| | CAAGAAAAGAGTGGAAGGCGACGAGGTGTTCTTCG |
| | AGAGAGCCCTGAGCAGATTCCTGGACGCCAAGAGG |
| | CCTAAAGTGACCACCGCCTACCAGTACTACAAGGA |
| | CGTGATCACCATCGAGAACGAGACAATCGTGGACG |
| | GCAAGATCCCCATCATCAGCTACACCGCCTTCAAC |
| | CAGCGGATCAAGAGCCTGCCTCCTTATCCTATCGC |
| | CGTGGCCAGACACGGCAAGTTCAAAGCCGATCAGT |
| | GGTTCGCCTACTGCAGCTCTCACATCCCTCCAACC |
| | AGAATCCTGGAACGCGTGGAAATCGATCACACCCC |
| | TCTGGACCTGATCCTGCTGGATGACGAACTGCTGA |
| | TCCCTCTGGGCAGACCCTACCTGACACTGATCGTG |
| | GATGTGTTCAGCAACTGCGTGCTGGGCTTCCACCT |
| | GAGCTATAAGGCCCCTAGCTATGTGTCTGCCGCCA |
| | AGGCCATTGTGCACGCCATCAAGCCTAAGACACTG |
| | AGCAACATCGGCATCGAGCTGCAGAACGACTGGCC |
| | CTGCTATGGCAAGTTCGAGACACTGGTGGTGGACA |
| | ACGGCGCCGAGTTTTGGAGCAAGTCTCTGGACCAC |
| | GCCTGCAAAGAGGCCGGCATCAACATCCAGTACAA |
| | CCCCGTGCGGAAGCCCTGGCTGAAGCCCTTCGTGG |
| | AAAGATTCTTCGGGATGATCAACCAGTACTTCCTG |
| | ACCGAGATTCCCGGCAAGACCTTCAGCAACATCCT |
| | GGAAAAAGAGGACTACAAGCCCGAGAAGGACGCCA |
| | TCATGCGGTTCAGCGTGTTCGTGGAAGAGTTCCAC |
| | AGATGGATCGTGGACATCTACCACCAGGACAGCGA |
| | CAGCCGGGACACCAGAATTCCCATCAAGCAGTGGC |
| | AGCACGGCTTCGATATCTACCCTCCACTGCAGATG |
| | GAAGTCGAGGACGAGAAGAGATTCAACGTGCTGAT |
| | GGGCATTGCCGACGAGCGGACCCTGACCAGAAACG |
| | GCTTCAAGTTTGAGGAACTGATGTACGACAGCACA |
| | GCCCTGGCCGACTACCGGAAGCACTACCCTCAGAC |
| | CAAGGACACCATCAAGAAGCTGATCAAGATCGACC |
| | CCGACGACCTGAGCAGCATCCACGTGTACCTGGAA |
| | GAACTGGAAGGCTACCTGAAGGTGCCCTGCACCGA |
| | TACCACAGGCTATACACAGGGACTGAGCCTGCACG |
| | AGCACAAAGTGACAAAGAAGATCAACCGCGAGATC |
| | ATCAGAGAGAGCAAGGACAACCTGGGCCTCGCCAA |
| | AGCCAGGATGGCCATTCATGCCAGAGTGCAGCAAG |
| | AGCAAGAGCTGTTCAACGAGAGCAAGACCAAGACA |
| | AAGCTGAGCGGCAGAAGTCCATCAACTGCAATCAG |
| | GTCGAGGCCGAGATGGAAGATGACGACTGGGACAT |
| | GGACCTGGAAGGATACTCGTGAAGAAGAAGGCCCA |
| | GCTGGCCGATATCAGCAGCACCGGCAAGAGCACAA |
| | TCGTGCTGCCTGAGAGCGAGCCCCAGAAGTCCATC |
| | AACTGCAATCAGGTCGAGGCCGAGATGGAAGATGA |
| | CGACTGGGACATGGACCTGGAAGGATACTGA |
| | (SEQ ID NO: 330) |
| tnsC | ATGACCAAGCTGACCCTGCAGCAGGACACAGCCCT |
| | GAAAGAATTCGGCCTGTGCTTCATCGAGCTGCCCA |
| | TCGTGTCCGAGACATTCCAGGACTTCGACGACCTG |
| | CGGTTCAACCGGGACTACCAGAGCGATCCCCAGTG |
| | CATGATGCTGACAGGCGAGACAGGCAGCGGCAAGA |
| | CCAGACTGATCCAAGAGTACCGGCGGAGAGTGAAC |
| | GCCAACAGCGGCTTTAGACACAGCGACGTGCCAGT |
| | GCTGATCACCAACATCAGCAGCAACAAAGGCCTGG |
| | AAAACACCCTGGTGCAGATCCTGAGCGACCTGGAT |
| | ACCTTCGGCTGCCACCAGAAAAAGCGGGGCATGAA |
| | GACCGACCTGACCAAGAAAGTCGTGCGGAACCTGA |
| | TCGCCGCCAACGTGGAACTGCTGATCATCAATGAG |
| | TTCCACGACCTGATCAAGTTCAAGAACTACCAAGA |
| | GATCCAGATCATCACGAGCGCCCTGAAGTTCATCA |
| | GCGAGGCCGCCAACATTCCCATCGTGCTTGTGGGC |
| | ATGCCTTGGATGAAGGACATCATCAACGACAGCGA |
| | GTGGGGCAGCAGACTGCGGAGAAGAAAGCACCTGG |
| | AATACTTCAGCTACATCCGGAAAGAGGACAGAGAG |
| | CACTTCCGGCTGCTGCTCGTGGGCTTCAGCAAGAG |
| | AATGAGCTTCGACACCAGACCTGTGCTGCACAGCA |
| | AAGAGCTGACAAGAGCCCTGTTCGCCGTGTGCAGA |
| | GGCGAGTTCAGACAGCTGATGGTGTTCCTGTACGA |
| | GGCCTGCAAGATGGCCCTGCAGAACAACGATCACA |
| | CCCTGAACGAGAAAACCCTGGCCGAAACCTTCGAC |
| | AAGCTGGGCTGTGAACACCTGAGCAGCAACCCCTT |
| | CACCATCAAGTTTAAAGAAATCCCCATTCCGGTGC |
| | TGAGCATCCCCAGCAGATACAACCCCAACGCTCTG |
| | GAAGAGAAGGACGAGATCATCGACCGGGTGTTCGA |
| | GTACATCTACTGA |
| | (SEQ ID NO: 331) |
| tnsD | ATGGCCTTCCTGTTCAGCCCTAAGAGCCTGGCCTT |
| | TAGCGGCGAGAGCCTGGAAAGCTACCTGCTGAGAG |
| | TGGTGGCCGAGAACTTCTTCGACAGCTACCAGCAG |
| | CTGTCCCTGGCCATCAGAGAGGAACTGCACGAGCT |
| | GGATTTTGAGGCCCACGGCGCCTTTCCAATCGAGC |
| | TGAAGAGACTGAACGTGTACCACGCCAAGCACAAC |
| | AGCCACTTCCGGATGAGAGCCCTGAGCCTGCTGGA |
| | ATCCCTGCTGGATCTGCCTCCTCACGAGCTGCAGA |
| | AACTGGCCCTGCTGCGGAGCAATAGAAGATTCGTC |
| | GGCGGCATGAGCGCCGTGCACAGAAACGGAATCGA |
| | CATCCCTCTGAGCTTCATCAGATGCGCCGACAAGG |
| | ACGGCATCGAGAGCGTGCCAATCTGCCCTCAGTGT |
| | CTGAAAGAGGGCCCCTACATCAGACAGGCCTGGCA |
| | CATCAAGCCCATCGAAGTGTGCGCCAAACACGGCT |
| | GCGAGCTGATCAATCACTGCCCCGATTGCCAGCAG |
| | CCTATCAACTACATCGAGAACGAGAGCATCACCCA |
| | CTGCGCCTGCGGCTTCGACTTTACCACAGCCAGCT |
| | CTGTGAAGGCCGATAGCCAGGCTGTGCTGCTGAGC |
| | AGATCCCTGTTTGATGGCGACGCCCTGAGCAACAA |
| | CCCTCTGCTGTTTATGGGCACCAGCGTGACCCACA |
| | GATTCGCCGCTCTGATCTGGTATCAGAAGTGCCAC |
| | GCCAGAAACACCGAGTGCATGGCCCATAGAGCCGT |
| | GGGCTACTTCGAGGATTGGCCCACCAGCTTCTACA |
| | GAGAACTGGACGCCGTGACCACAGGCGCCGAAGCC |
| | AGACTGATCGACCTGTTCAACCGGACCAGCTTCCG |
| | GTCCATCTACGGGGAGCTGATCCTGGACTCACAGT |
| | GCCTGCTGCCTGAGGACAAGGACCCTCACTTCATC |
| | TATCTGGCCCTGATGGAGTACATCAGCAAGCTGGT |
| | CGAGTCTCACCCCAAGAGCAAGAAACCCAACGTGG |
| | CCGACATGCTGGTCACCGTGGCTGAAATTGCCGTG |
| | CTGCTGTCCACCACACACGAACAGGTGTACCGGCT |
| | GTACCAGGATGGCGTGCTGACAGCCGGCATGAGAA |
| | GCAAGATCCGGACCAGAATCAGCCCTCACATCGGC |
| | GTGTTCTACCTGCGGCAAGTGATCGAGTACAAGAC |
| | CTCCTTCGGCAACGACAAGCAGGGCATGTACCTGA |
| | GCGCTTGGTGA |
| | (SEQ ID NO: 332) |

[0099] 40633|4|GCA_000153265.1_ASM15326v1_genomic|CH902601.1|492617|Vibrio (ID: 105)

TABLE 15

| Elements | Sequences |
|---|---|
| tnsA | ATGTACCGGCGGAACCTGAGACACAGCAGAGTGAA |
| | GAACATCTTCAAGTTCGTGTCCAGCAAGATGAACA |
| | AGGTGCTGACCGTGGAAAGCCGGCTGGAATTCGAT |
| | ACCTGCTTCCACCTGGAATACTCCCCAGACATCAG |
| | CTTCATCGAGGCCCAGCCTGAGGGCTTCATCTACC |
| | CCTTCCAAGAGAAACATCTGCCCTACACACCCGAC |
| | TTTCTGATCGTGGACAAGGGCGAGAGAAAGCTGAT |
| | CGAAGTGAAGCCCTTCAAGAAAACACAGAGCCCCG |
| | AGTTCCAGCAGCGGTTCTCTGCCAAAAAAGCCCAG |
| | GCCGACAACTTCGACATCCCTCTGATCCTGGTCAC |
| | CGAGAAGCAGATCAGAGTGAACCCCATCCTGAACA |
| | ACCTGAAGCTGCTGCACAGATACAGCGGCTTCCAG |
| | AGCTTCACCCCTCTGCACCTGAGCTTTCTGAAGCT |
| | GGTCAAGCGGTACAAACAGATCAAAGTCAAGGACT |
| | TCATCACCAGCTGCCACGTGGAACAGAACGTGGCC |
| | GTGAAAACAGCCCTGGCTCTGATCAGCTCTGGCAT |
| | GCTGCACACCAACCTGAGCGCCCAAGAGATCAGCC |
| | TGGACAGCATCGTGTGGTGCTCTGGCCACGAAGAG |
| | AGCTGA |
| | (SEQ ID NO: 333) |
| tnsB | ATGAAGAACCACGACAAGCCCAGCATCTTCAGCGA |
| | CGAGTTCGAGTGCGAGAACCAGATCGAGGAAAGCG |
| | AGCTGGCCTCCAATGCCGAGTGTGCCGTGTCTAGA |
| | GATCTGGCCAGCTATCCCGACGCCACACAGAAAGA |
| | AGTGATGCGGCGGTACTACTTCATCGAGTGGATGC |
| | GGAAAGAGCTGGCTGGCGGCTGGACCCAGAAGAAC |
| | CTGGATCCTCTGCTGAACAGAGCCGCCAGAGAACT |
| | GCAGCTGAAGGCCCCTAAATGGCGCGCTCTGGCCA |
| | ACTGGTGGAAGATCTACAGCCAGAGCGGCTTCAAG |
| | CTGACCTCTCTGATCCCTAGACAGACCGCCGGCAA |
| | CCGGCACCTGAAAGTGAAGAACGAGATGGTGTTCT |
| | TCGACAAGGCCCTGGAAAGATACCTGGTGCCTGAG |
| | AGGCCTTCTATCGCCGCCGTGTACCAGTACTACAG |
| | CGACCTGATCAGAATCGAGAATCAGAACATCGTCG |
| | AGAACAAGATTGAGGCCCTGAGCTACAAGGGCTTC |
| | TACAACCGGATCAAGAAGCTGAGCGCCTACGACGT |
| | GAAGGTGGCCAGGCACGGAAAGTATCTGGCCGACA |
| | TGGAATTCAACAGCATCGACGCTCACTACCCCGCC |
| | AGCAGAGTGCTGGAAAAGGTGGAAATCGATCACAC |
| | CCCTCTGGACCTGATCCTGCTGGACGACGAGCACA |
| | ACTTCCCCATCGGCAGACCCTACCTGACACTGCTG |
| | ATCGACCAGTTCAGCCGGTGCATCATCGGCTTCTA |
| | CCTGGGCTTCAAAGAGCCCAGCTACTTCTCCGTGA |
| | TGAAGGCCCTGCTGAACGCCATCAAGCCCAAGAAC |
| | TACATCAGCGAGCAGTTCCCCAGCATCGAGAAAGA |
| | GTGGTGCTGCGAGGGCAAGATGGAAAGCCTGGTGG |
| | TGGATAACGGCGCCGAGTTCTGGTCCAAGAGCCTG |
| | GAACAGTCCTGCCTGGAACTGGGCATCCACATCCA |
| | GTACAACCCCGTGCGGAAGCCCTGGCTGAAACCCC |
| | TGGTGGAACGGATCTTCCGGACCATCAACAGCAAG |
| | CTGACAATCAGCATCCCCGGCAAGACCTTCAGCAA |
| | CATCCTGCAGAGAGAGGACTACGACAGCAAGAAAG |
| | ACGCCGTGATGCGGTTCTCCATCTTCAACGAGATC |
| | CTGCACAAGTGGATCATCGACGTGTACCACCACGA |
| | GCCTGACAGCAGAAAGCGGAGCATCCCTTACCTGA |
| | AGTGGCAAGAGGGCATCAACTACCTGCCTCCAATC |
| | AGCTACAGCCCCGAGGACGAAAAACAGCTGGCCAT |
| | CATCCTGGGCATCAAGGCCAAACGGCAGCACAGAA |
| | GAGGCGGAATCCACATTCACAGCCTGAGATACGAC |
| | TCTGAGATCCTGGCCGACTGCAGACGGATGTACCC |
| | TAGCGTGACAAGCGTGCTGACCAAGACAAACCCCG |
| | ACGACATCTCCTACATCTACGTGTTCATCGAGCAC |
| | GAGCAAAAGTACATCAAGGTGCCCTGCGTGGACCC |
| | TATCGGCTACACAAAGGGCCTGAGCCTGTTCCAGC |
| | ACCAGATCAACCTGAAGCTCCAGAGAGAGTACATC |
| | GACAAGAAAACCGACCTGGACAGCCTGGCCAAAGT |
| | GCGAGCAGACTGGCCAAGCACGCCAGCATCGGCAG |
| | CGATAAGAAAGAGTCTATCAGCACAAGCCCTCTGC |
| | TCAACGTGTCCATGTACATCAACGACCGGATCCTG |
| | AAAGAGATCAACGATCTGAAGTCCCGGCAGAAGAA |
| | GGCCACCAAGGGCATTAGCAGACTGGCCAAGCACG |
| | CCAGCATCGGCAGCGATAAGAAAGAGTCTATCAGC |
| | ACAAGCCCTCTGCTCAACGTGTCCAAGGACGCCGA |
| | TCAGACCAAGCCTGTGCAGCCTAAAGGCGACGACT |
| | GGGACGATCTGATCAGCGATCTGGACCCCTACTGA |
| | (SEQ ID NO: 334) |
| tnsC | ATGCGGAGACTGAGCAAGCAGCAAGAGCAAGCCCT |
| | GCGCGAGTACATCGGCGTGTTCATCGAGAGCCCTA |
| | TCGCCACCACCATCATGGACGACTTCGAGCGGCTG |
| | CGGTACAACAAACACCTCGGCGGAGAGCAGCAGTG |
| | TATGCTGCTGACAGGCGATACAGGCAGCGGCAAGA |
| | GCAGACTGATCCAAGAGTACAAGCAGCGGCTGTGC |
| | AGCGACAGCAACGAGAGCAGTTTTAGCCTGCTGGT |
| | GTCTCGGATCCCCAGCAAGCCTAGCCTGCCTAGCA |
| | CAATCATCCAGCTGCTGAAGGACATGGGCCACTTC |
| | GGCAGCACCTACAGAAAGGGCATCAGCAACGACCA |
| | GAGCCTGACCGAGTCTCTGATCCGGTGCCTGAGAA |
| | GCAAGAACACCGAGCTGATCATCATCAACGAGTTC |
| | CAAGAGCTGGTCGAGTTCAAGTCCGGCAAGGCCCT |
| | GAACGAGATCGCCAACCGGCTGAAGTACATCAGCG |
| | AAGAGGCCCAGGTGCCAATCGTGCTCGTTGGAATG |
| | CCTTGGGCCAAGAAGATCACCACCGAACCTCAGTG |
| | GGCCAGCAGACTGCTGATCCAGAGAGAGCTGGAAT |
| | ACTTCAAGCTGAGCGACAAGCCCGAGTACTTCATC |
| | AGATTCGTGAAGGGCCTGATCCTGCGGATGCCCCT |
| | GGAACCTAGCGAGAAGCTGTTCAACAAGGCCGTGA |
| | TCCTGAGCCTGTTCAGCGTGTCCCAGGGCCAGATC |
| | AGAAAGCTGAAGCACTTCCTGGACGAAGCCCTGAA |
| | GCTGGCCATGCTGGAAGAACAGAGCGAGATCACCC |
| | CTCACAGCTTCAGCAAGATCTTCAGCATGTGGTAT |
| | CCCAACCAGACGAACCCCTTCAAGCAGAAGGCCGA |
| | GGAAATCATCGGGCAAGAAGTGAAGTCCTACAGCT |
| | ACTACGACTCTGGCGCCGACAATGAGTTCGAGGCC |
| | ATCATTCCCACACAGTACACCGACAAGCTGACCCT |
| | GAGCCAGATCATCAAGAAATGA |
| | (SEQ ID NO: 335) |
| tnsD | ATGCTGACCCTGACCAAGAGCATCCTGGTGTTCCG |
| | GGTGTCCATGTTCCTGCTGGAACCCGCCAAGCTGT |
| | ACGTGACCGAGAGCCTGGAAAGCTTCCTGATCAGA |
| | CTGTGCCAGGCCAACGGCTTCGAGAGCTACAGAAT |
| | CATGGCCCTGGTCATCAGAGACTGGATGTACAACA |
| | ACGACTTCGAGTCTGCCGGCGCTTGGCCTCTGGTT |
| | CTGGAACAGGCCAATATCTTCCACGCCAACCACAG |
| | CAGCGGCTTCAGAGTGCGGGCCTTCAAGCTGCTGG |
| | ATAGCCTGTTCAGCGACAGCACCAGCAGCGTGCTG |
| | GAAAGATGCCTGCTGAACAGCGCCACACTGTTCAG |
| | CCCCAAGATCAGCTCCGTGTCCTACCAGAACGTGT |
| | TCATCCCTCAGCTGTTCATCCGGCGGAAGGGCATC |
| | CCTGTGTGTCCCGAGTGCCTGAAAGAGAACGCCTG |
| | CATTCCTGTGCTGTGGCACGTGGAACCCTACCAAG |
| | TGTGCCACCACCACCAGTGCGAGCTGATTAGCCAC |
| | TGTCCTAGCTGCAACCGGCAGCTGAACTACGTGGA |
| | AAGCGAGCAGATCACCAAGTGCGAGTGCGGCTACG |
| | ACCTGTGCTTCATGGAAAAGCTGCACAGCCAGAGC |
| | AACGCCCTGAAGCTGAGCCAGTATATCGCCGGGGA |
| | GAAAGTGAACGGCCTGCCTGATGGCCTGGACATCT |
| | CTGAGAGACTGGGCATCATCCTGTGGTTCTACAAG |
| | AGATACCCCAACGTGAACAGCTACGACGCCAACGC |
| | CATCGTGGAATACTTCAGCCAGTGGCCTAACATCT |
| | ACATCGACGAGCTGAACGCCATCAGCGAGCACGCC |
| | ATCGACAGACAGATCAAGCCCTTCAACCACACCGA |
| | CTTCAACCTGATCTTCGGCGACATCCTGAGCAGCT |
| | GCAGAAAGCTGCCCTACAGAAACCCCGAGCAGAAC |
| | ATCATCCAGCAGGCCAGCATCGACTACCTGATCAA |
| | GCTGGTGGAACAGAACCCCAAGAGCAAGACCAGCA |
| | ACTTCGCCGACCTGCGGCTGAATATCATCGAGGTG |
| | TCAGGCGTGCTGAGCACCAGCGTGGAACAGGTGTA |
| | CAGACTGGTGGAAGAGGGCTACCTGCAGCTGGCCA |
| | TCCGGCTGAAGATCAGAGAGAGACTGCCTCCATTC |
| | AAGGGCGCCTTCTACCTGCGGCAAGTGATCGAGCT |
| | GCGGCAGTCTCAAACACCCCTGCCTCAGAGCAAGC |
| | AGATTACCTACCTGCCTAGCTGGTGA |
| | (SEQ ID NO: 336) |

[0100] 43668|7|GCA_000238275.3 PTnd 2.0 genomic|AHCF02000042.1|218104|PseT doalteromonas (ID: 106)

TABLE 16

| Elements | Sequences |
|---|---|
| tnsA | ATGGTTCGATGGCTGACCCACATGTACCGGCGGAA |
| | GCTGAAGCACAGCAGAGTGAAGAACCTGCACAAGT |
| | TCGCCAGCCAGAAGAACAAGAGCACCTGTCTGGTG |
| | GAAAGCAGCCTGGAATTCGACGCCTGCTTCCACTT |
| | CGAGTTCAGCCCTTCTATCGCCGCCTTTGAGGCTC |
| | AGCCTCTGGGCTACGAGTACCAGTTCGACAACCTG |
| | ATCTGCCGGTACACCCCTGACTTTCTGCTGACACA |
| | CACCGACGGCACCCAGAAATTCATCGAAGTGAAGC |
| | CCCAGAGCAAGATCGCCGACGAGGACTTCAGAGCC |
| | CGGTTCATCGAGAAGCAGACAATCGCCAAGCAGGA |
| | CGGCAGGGACCTGATCCTGGTCACCGACAAGCAGA |
| | TCCGGGTGTACCCCACACTGAACAACCTGAAGCTG |
| | CTGCACAGATACAGCGGCTTCCAGAGCCTGACAGA |
| | GCTGCAGGCTTCTGTGCTGGAACTGGTCAAGCAGT |
| | ACGGCTCCATCAAAGTGGGCCAGCTGGTGTCCTTC |
| | CTGAAAGTGACAGCAGGCGAGCTGCTGGCCACAGT |
| | GCTGAGATTGCTGTCTCTGGGACAGCTGTTCGCCG |
| | ACCTGACCACCAACGAGATCAGCATCGAGACAGCC |
| | ATCTGGTCCAACAACGTGTGA |
| | (SEQ ID NO: 337) |
| tnsB | ATGTTCAACGACGGCCTGTTCGAGGACGAGTTCAA |
| | CCAGCCTCTGCCTAAGGTGGAAACAAAGCTGCCCC |
| | AGAACTACGCCAAGGACCTGCAGGCCCTGCCTGAG |
| | AAGATCAAGACCACCACCTTCGCCAAGCTGAAGTA |
| | CATCCAGTGGCTGGAAGCCAACATCCAAGGCGGCT |
| | GGACCCAGAAGAACCTGGAACCTCTGCTGAAAGTG |
| | ATGCCCGAGGTGGAAGGCGAGAAGAAGCCCTCTTG |
| | GAGAACAGCCGCCAGATGGTACAGCGCCTACACCA |
| | ACGCCGACAAGAACATCATGGCTCTGATCCCCAGC |
| | CACCAGAAGAAGGGCAACAGAGAGAGAGACACCGC |
| | CACCGACAAGTTCTTCGAGAAGGCCCTGGAACGCT |
| | ACCTGGTCAAAGAAAAGCCTAGCGTGGCCTCCGCC |
| | TACAAGTACTACGCCGACCTGGTCATCATCGAGAA |
| | CGACAGCGTTGTGGGCAGCGTGCTGAAGCCCCTGA |
| | CCTACAAGGCCTTCAAGAACCGGATCGACAACCTG |
| | CCTCAGTACGAAGTGATGATCGCCAGATACGGCAA |
| | GCGGCTGGCCGATATCGCCTTCAACAAAGTGGAAG |
| | GCCACACCAGACCTACCAGAGTGCTGGAAAAAGTG |
| | GAAATCGATCACACCCCTCTGGACCTGATCCTGCT |
| | GGACGACGAGCTGCACATTCCTCTGGGCAGACCCA |
| | CACTGACCATGCTGGTGGATGTGTACAGCCACTGC |
| | ATCGTGGGCTACTACTTTAGCTTCAGCGAGCCCAG |
| | CTACGACGCCGTGCGTAGAGCTATGCTGAACGCCA |
| | TGAAGCCCAAGAACGAGGTGGCCAAGAGATACCCC |
| | GACACCATCAACGAGTGGAAGTGCGCCGGCAAGAT |
| | CGAGACACTGGTGGTGGATAACGGCGCCGAGTTCT |
| | GGTCCAACTCTCTGGAACTGGCCTGCGAGGAAATC |
| | GGCATCAACACCCAGTACAACCCCGTGGCCAAGCC |
| | TTGGCTGAAGCCTTTCGTGGAACGGATGTTCGGCA |
| | CCATCAATACCGAGCTGCTGGACCCCATTCCTGGC |
| | AAGACCTTCAGCAACATCCTGCAGAAGCACGAGTA |
| | CAATCCCAAGAAAGACGCCATCATGCGGTTCACCA |
| | CCTTTATGCAGCTGTTCCACAAATGGGTCGTCGAC |
| | GTGTACCACCAGGACGCCGACAGCCGGTTCAAGTA |
| | CATTCCTAGCCAGCTGTGGGACCAGGGCTTCAATA |
| | CCCTGCCTCCTACCGTGCTGAGCAACGACGATCTG |
| | CAGCAGCTGGATGTGGTGCTGTCCATCAGCTACCA |
| | CCGGGTGCTGAGAAAAGGCGGCATTCAGCTGGAAA |
| | ACAGCTCCTACGACAGCACCGAGCTGGCCAACTAC |
| | CGGAAGCAGTTCAGCCACAAGGTGTCCCAAGAGGT |
| | GCTGATCAAGCTGAACCCCGACGACATCTCCTACA |
| | TCTACGTGTACCTGGACAAGCTCGAGCACTACATC |
| | AAGGTGCCCTGCAAGGACCAAGAGTACACCCAGGG |
| | CCTGAGCCTGAACCAGCACAAGATCAACATGGATC |
| | CAGAACGAGTTCGAGGAACTGAAGAACGCCCCTAA |
| | GAACAGCAAAGTGAAAGGCGGGAAAGCCCTGGCCA |
| | AACGGATCCACCGGGACTTCATCAGCGGCAGCATC |
| | GACAATGTCGGCCTGGCCAAGGCCAGAATGTTCAT |
| | CCACAACAAGATCCAGAACGAGTTCGAGGAACTGA |
| | AGAACGCCCCTAAGAACAGCAAAGTGAAAGGCGGG |
| | AAAGCCCTGGCCAAACACCAGAACGTGTCCAGCGA |
| | CAGCCAGAAGTCTATCGCCCAGAGCGAGCCCGTGG |
| | AACCTAAGAAAGTGACCCCTAAAGAACAAGTGACC |
| | GACAGCTGGGACGACTTCATCTCCGACCTGGACGG |
| | CTTCTGA |
| | (SEQ ID NO: 338) |
| tnsC | ATGCTGACCGACAAGCAGAAAGAGAAGCTGAACGA |
| | GTTCCGGGACGTGTTCATCGAGTACCCCATCATCA |
| | CCACCGTGTTCAACGACTTCGACCGGCTGAGACTC |
| | GGCAAAGGACTGGCCGGCGAGAAGCCTTGCATGCT |
| | GCTGAATGGCGATACCGGCACAGGCAAGACAGCCC |
| | TGATCAAGCAGTACAAAGAGCGGCATCTGCCCCAG |
| | TTCATCAACGGCGTGATGAATCACCCCGTGCTGGT |
| | GTCTCGGATCCCCAGCAATCCTACACTGGAAAGCA |
| | CACTGGCCGAGCTGCTGAAGGATCTGGGCCAAGTG |
| | GGCAGCACCGAGAGAAAGCTGAGAGTGAACGGCAC |
| | CAGACTGACCACCAGCCTGATTAAGTGCCTGAAAA |
| | CCTGCGGCACCGAGCTGATCATCATCGACGAGTTC |
| | CAAGAGCTGATCGAGCACAACCAGGGCAAGAAGCG |
| | GAGAGAGATCGCCAACCGGCTGAAGTACATCAACG |
| | ATGAGGCCGGCGTGTCCATCGTGCTCGTTGGAATG |
| | CCTTGGGCCGAGAAGATCGCCGATGAGCCTCAGTG |
| | GTCTAGCAGACTGCTTGTGCGGAGACAGCTGCCCT |
| | ACTTCAAGCTGAGCGAGAACCCCAAGCACTTCGTG |
| | CAGCTGATTATCGGCCTGGCCAACAGAATGCCCTT |
| | CACCGAGAAGCCAAGCCTGTCTGAGCAGGCCACAG |
| | TGTTCGCCCTGTTCAGCCTGAGCAAGGGCTGCTTC |
| | AGAACCCTGAAGTACTTTCTGGACGACGCCGTGCT |
| | GTACGCCCTGATGGACAATGCCAAGACACTGACCA |
| | CAAAGCACCTGGTCAAGGCCTTCGACGTGCTGTTC |
| | CCCGATCTGGCCAACCTGTTTACACTGCCCGTGGC |
| | CAAGATCACCGCCAGCGAGGTGGAAAGATACAGCC |
| | TGTACAAGCCCGAGAGCGCCCAGGACGAGGATCCC |
| | TTTATCACCACCAAGTTCACCGACAGGATGCCCAT |
| | CAGCCAGCTGCTGAGAAAGTGA |
| | (SEQ ID NO: 339) |
| tnsD | ATGCACTTCCTGGTGCAGACCAAGCCTTATCCTGA |
| | CGAGGCCCTGGAAAGCTACCTGCTGAGACTGGCCA |
| | GAGACAACAGCTACGACGGCTACAGAGAGCTGGCC |
| | GACATTCTGTGGCAGTGGCTGGCCGAACAGGACCA |
| | CGAACTTGAAGGCGCTCTGCCCCTGGAACTGAACA |
| | AAGTGGACGTGTACCACGCCAGACAGGCCAGCAGC |
| | TTCAGAATCAGAGCCCTGAAACTGGTGGCCCAGCT |
| | GGCTGATGTGAACGCCGGCGATATTCTGGAACTGG |
| | CCTGCAGAAGAAGCAACTTCAAGTTTGGCAACCTG |
| | GCCGCCGTGTCCAGAAACGAGCTGACAATCCCACT |
| | GGAACTGCTGCGGACCGACTACATCCCTGTGTGCA |
| | TCGAGTGTCTGAGCGAGAGCAGCTACATCCCCTTC |
| | TACTGGCACCTGAAGCCTTACAAGGCCTGCCACAA |
| | GCACAAGACCCAGCTGACCACACACTGCGGCGAGT |
| | GCCACAACCTGATCGACTACAGAGCCAGCGAGGCC |
| | TTCCTGGAATGTTCCTGTGGCTGCAAGCTGACCAG |
| | CAGCGAGCAGCTGAACGACGCCGACTTCAAGATCG |
| | CCTTTGCTCTGGCCTCCAGCAACAGCCAGAAAATC |
| | GTGGGCCTGATCAGTTGGTTCGCCAAAGTGAAGCA |
| | GCTGGACGTGCGGGATGCCGATTTCAACAGAGCCT |
| | TCGTGGACTACTTCAGCACCTGGCCTGATAGCTTC |
| | ACCGCCGAGCTGGATCTGCTGACCAACAACGCCAG |
| | ACTGAAACAGCTGAACCCCTTCAACAAGACCAAGT |
| | TCAACAGCGTGTACGGCAACGTGATCCGGGATGCC |
| | CAGATTGCCGCCACCTCCAACAGAAAGAACAAGGT |
| | GCTGGACGAGATCATCAACTACTTCGTGGAACTGG |
| | TGGACAGCAACCCCAAGGCTAAGCACCCCAACATT |
| | GCCGACCTGCTGCTGTGCACATTTGACGCCGCTGT |
| | GCTGCTGAACACCACCACCGAACAGGTGTACCGGC |
| | TGCACCAAGAGGGCTTTCTGAACTGCGCCTATCCT |
| | CAGAAGAAACACGAACAGCTGAGAGCCGACAGCCA |
| | CGTGTTCTACCTGCGGCAAGTGATCGAACTGCAGC |
| | AGGCCTTTGCCGCCGAGAAGCCTCAGACCAAGAAG |
| | CAGTTTATCGCCCCTTGGTGA |
| | (SEQ ID NO: 340) |

[0101] 43667|0|GCA_000238255.4 ASM23825v4_genomic|CP011039.1|3154175|PseTd oalteromonas (ID: 107)

TABLE 17

| Elements | Sequences |
|---|---|
| tnsA | ATGATCATGATTCGGCGGAAGCTGAAGCACAGCAG |
| | AGTGAAGAACCTGTACAAGTTCGCCAGCCAGAAGA |
| | ACAAGGCCACCTGTCTGGTGGAAAGCAGCCTGGAA |
| | TTCGACGCCTGCTTCCACTTCGAGTACAGCAGAGA |
| | GATCAAGAGCTTCGAGGCCCAGCCTCTGGGCTTTG |
| | AGTACGAGTTCGACGGCAGGATCTGCCGGTACACC |
| | CCTGACTTTCTGCTGACCCACCACGAGAAGCCCCA |
| | AAAGTACATTGAAGTGAAGCCCTTCAGCAAGATCG |
| | CCAACAGCGAGTTCAGAGCCAGATTCGCCCAGAAA |
| | CAGCTGGTGGCCAAAGAGCAGATCGGCATCGAGCT |
| | GATCCTGGTCACCGACAAGCAGATCCGGGTGTACC |
| | CCACACTGGACAACCTGAAGCTGCTGCACAGATAC |
| | AGCGGCTTCCAGAGCCTGACCGAACTGCAGCTGAG |
| | CATCATCCAGCTGCTGAACCAGTGGCGCAAGCTGA |
| | CCATCCAGAACCTGGTCAAGACCCTGAAGGCCAGC |
| | ATCGGAGAGATCCTGGCCAGCGTGTACAGACTGCT |
| | GTCTCTGGGCAGCGTGAACAGCGACCTGAATACCG |
| | AGCTGACACTGGAAAGCGTGATCTGGGCCGATGGC |
| | GTGTAA |
| | (SEQ ID NO: 341) |
| tnsB | ATGGAATTCGAGGACGAGTTCAGCTTCGAGGAAGC |
| | CCCTCAGAAGCTGGCCAAGACCGCCAATACCGAGG |
| | AAAGCAACCCTCAGCCTCGCGACCTGGAAAGCCTG |
| | AGCAAAGAGGTGCAAGAGGCCACACTGGCCCGGCT |
| | GAAATACGTGAAGTGGCTGAAGCAGAGACTGATCG |
| | GCGGCTGGACCCAGAAGAATCTGGCTCCTCTGCTG |
| | GCCGAGATGCCCGAGTTTGAGGGACAAGAGAAGCC |
| | CAAGTGGCGGACAGTGGCTGGATGGTACGCCGACT |
| | ACATCAAGGCCGAAGAGGACATCCACGCTCTGATC |
| | CCCAAGCACCACCGGAAGGGCAATAGACAGGCCAG |
| | AAGCGACACCGACAAGTTCTTCGAGCTGGCCCTGA |
| | CCAGATACCTGACCAAAGAAATCCCCAACGTGGCC |
| | AGCGCTCACCGGTTCTACTGTGACCAGATCGTGCT |
| | GGAAAACGAGAAGGTGCTGGGCGAGCCTCTGAAGC |
| | CCCTGACCTACAAGGCCTTCAAGAACCGGATCGAC |
| | AACCTGCCTCAGTACGAAGTGATGCTGGAAAGATA |
| | CGGCAAGCGGCTGGCCGACATCGAGTACAACAAAG |
| | TGATGAGCCACAAGCGGCCCACCAGAGTGCTCGAG |
| | AGAGTGGAAATCGATCACACCCCTCTGGACCTGAT |
| | CCTGCTGGACGATGAGCTGGATGTGCCACTGGGCA |
| | GACCTACACTGACCCTGCTGATCGACGTGTACAGC |
| | CACTGCGTCGTGGGCTTCTACCTGGGCTTTCAGAG |
| | CCCTGGCTACGATGCTGTGCGGAGAGCCATTACAC |
| | ACGCCATGAAGCCTAAGATCTACCTCAAGAGCACA |
| | TACCCCGAGGTGGTCAACGAGTGGCCTTGCTGCGG |
| | AAAGATCGAGACACTGGTGGTGGACAACGGCGCCG |
| | AGTTTTGGTGTCAGAGCCTGGAACTGGCCTGCGAG |
| | GAAGTGGGCATCAACATCAGCTACAACCCCGTGGG |
| | CAAGCCTTGGCTGAAACCCTTCGTGGAACAGTTCT |
| | TCAAGACCATCAACGAGATGATGCTGAGCCCATTT |
| | CCTGGCAAGACCTTCAGCAACATGCTGGCCAGGCA |
| | CGACTACAACCCTAAGAAGGACGCCATCCTGAGAT |
| | TCGGCACCTTCACCATGCTGTTCCACAAGTGGATC |
| | GTGGACGTGTACCACCAGAGCGCCGATGCCAGATT |
| | CCGGTACATCCCTTGCGAGGACTGGAACAAGGGCT |
| | TCGCTGTTCTGCCTCCTGCTCAGCTGACACAGCAG |
| | GACACCGATAAGCTGGACGTGGTCATGTGCATGGC |
| | CAAAGAGAAAACCCTGAGAAAAGGCGGCATCAAGA |
| | ACCTGCACATCAACTACGACAGCGACGAGCTGAGC |
| | GTGTACAGAAAGCGGTACTGCGCCAAGAAATCCAT |
| | CAAAGTGAAAGTGAAGATCAACCCCGACGACCTGA |
| | GCTACGTGTACGTCTACCTGAACGCCCTGGAAAAC |
| | TATATCAAGGTGCCCAGCATCGACCTGGACGGCTA |
| | CACAATGGGACTGTCTCTCGTGCGGCACAAGATCC |
| | ACCTGAAGTTCCACCGGGATTACATCCAGGGCAAA |
| | GTGGACCTGCTGGGCCTCGCCAAAGCCAGAAGATT |
| | CATCTGGCTAGAGCCCAGGGCATCGACAACACCCA |
| | AGTGAAGTCCATCGTGACAATCCCCGAGGCCAAGA |
| | AAACCGAGCCGACGAGCGCGTGAAAGAAGAGGCCC |
| | GGCAGCTGAAGAACGTGGTGTCCAAGACCAAAGTG |
| | ACCGGCACCAAGGCCATGGCTAGAGCCCAGGGCAT |
| | CGACAACACCCAAGTGAAGTCCATCGTGACAATCC |
| | CCGAGGCCAAGAAAACCGAGCCTTCTCCTGCCGAC |
| | ACAAAAGTGAAAAAGGACGTGGAAAACTGGGACGA |
| | CTTCGTGTCCGATCTGGAAGCCTTCTGA |
| | (SEQ ID NO: 342) |
| tnsC | ATGCTGACCCAGGCCAAGAAGGCCAAGCTGAACCA |
| | GTTCAAGGCCGTGTTCATCGAGTACACAATCCCCA |
| | AGACCATCATCAACGACTTCGACAAGCTGCGGCTG |
| | CACTACGATCTGGCCGGCGAGAAGCCTTGCATGAT |
| | GCTGTCTGGCGATACCGGCTGTGGCAAGAGCGCCC |
| | TGATCAAGCACTACTACGACAACAACCCTCCTCAC |
| | TTCGCCGACGGCCAGAGAAAAGTGCCTGTGCTGCT |
| | GAGCAGAATCCCCAGCAATCCCAGCATCGAGAGCA |
| | CCCTGAAACAGCTGCTGCACGACCTGGGACAGTTC |
| | GGCGCCAAGTCTAGCAAGAGACTGAAGAACGGCAA |
| | CGAGATCGCCCTGGCCGAGTCTCTGGTTGAGCAGC |
| | TGAAGAGAAGCGGCACCGAGCTGATCATCATCGAC |
| | GAGTTCCAAGAGCTGGTGGAAAACAACCTGGGCAA |
| | GAAGCGGCGGGATATCGCCAATCAGTTCAAGTACA |
| | TCAACGAGAAGGCCGGCATCAGCATCGTGCTCGTG |
| | GGAATGCCTTGGATCGAGCAGATCGCCGATGAGCC |
| | TCAGTGGTCCAGCCGGATCTTTATCAGACGGTTCA |
| | TCCCCTACTTCCGGATCAGCAAGAAAGAGGAACTG |
| | CAGCTGTTCATCCGGGTGCTGAAGGGCTTCGCCAA |
| | CAGACTGCCTTTCAGCGACAAGCCCAGATTCGAGA |
| | ACCTGGACATTGCCCTGAGCCTGTTCGCCATCAGC |
| | AACGGCTGTCTGCGGAAGCTGAAGAACTTCCTGGA |
| | CAGCGCTCTGACTGAGGCCCTGATTACCGATGCCG |
| | TGACACTGAACAAGCACTGCCTGAGCAGCGCCTTC |
| | AAGGCTTGGAGGCCCGAGCTGGACAACGTGTTCGA |
| | GATGAACGTGAACGAGATCCAGGGCTGCGAGGTGG |
| | AACAGTACAGCACCTTCAAGCCTGACGGCCCTCAG |
| | GACGAGGACCCCTTTATCGATACCCAGTTCTGCAA |
| | CAAGGTGCCCCTGGTGCAGCTGCTGAAGAAGTGA |
| | (SEQ ID NO: 343) |
| tnsD | ATGCAGTTCCTGAGCCAGGCCACACCTTATCCTGA |
| | CGAGACAATCGAGAGCTACCTGCTGAGACTGTCCC |
| | AGGACAATGGCTACCTGGGCTTCGCCGACATGGCC |
| | GACATTCTGTGGGATTGGCTGGTCACCCAGGACCA |
| | CGAACTGGAAGGCGCTTTCAGCAACGAGCTGCAGA |
| | GCGTGGACGTGTACAAGGCCAGCCAGAGCAGCAAC |
| | TTTAGAGTGCGGGCTCTGAGACTGGTGGCTCAGCT |
| | TGCTGGCGTGGAAGCCTCTGAGCTGCTGAATCTGT |
| | GCTGGCTGAGAAGCAACACCCAGTTCGGCGTGATC |
| | ACCGCTGTGGCTAGATCTGGACTGCTGGTGCCTAG |
| | ACAGCTGCTGCGCAAGAGCAACATCCCTGTGTGCA |
| | CCGAGTGCCTGAAGCAAGAGGTGTACGTGCCCTAC |
| | CTGTGGCACCTGAAGGTGTACAAAGCCTGCCACAA |
| | GCACAACCGGCAGCTGACCAAGATCTGCAGACAGT |
| | GCAACACCGAGATCGACTACAGAGTGTCCGAGGCC |
| | TTCCTGGAATGCGAATGCGGAGCCGCCATTAAGCA |
| | GGGCCCTAAAGCCTCTCAGGCCGACCTGAAACTGG |
| | CCAGCGCTCTGACATCTACCGCCGATGCCAAACTC |
| | GTGGGACTGATGGCCTGGTTCAGCCAGTGGCAGAG |
| | CATCAGCTTCGACGACGACGAGTTCAGCGAGCTGT |
| | TCGTGTCCTACTTCTCCAACGGCCTGAGCGGATTC |
| | CAGGACGAGCTGAGCAATATCGCCGAGCTGGCCAA |
| | GATTAAGCAGCTGCGGCCCTTCAATCACACCCCTT |
| | TCAACGACGTGTTCGGCAGCCTGCTGAAGGACTCC |
| | AAACTGGCCTGTGCCGGCAGCCAGGGCTATAATAC |
| | TGTGCAGCTGGCCATCATTGCCTTTCTGACCAAGC |
| | TGGTGGAACAGAACCCCAAGAAGAAGCACCCCAAC |
| | CTGTCCGACCTGCTGATCTCCATGCTGGATGCCGC |
| | TGTGATCCTGGGCACCAACACCGAACAGGTGTTCC |
| | GGCTGTACGAGGAAGGATTTCTGGCCGCTGTGCAG |
| | CCTCCTAAGAAGAACACCTTCCTGAAGCCTAGCGA |
| | CAACCTGTTCTACCTGCGGCAAGTGATTGAGCTGC |
| | AGCAGAGCTTCGCCCCTAGCATCAGCAACAAGCCC |
| | CAGCAGTTTGTGCCTCCTTGGTGA |
| | (SEQ ID NO: 344) |

[0102] 43674|0|GCA_000238395.4 ASM23839v4_genomic|CP011025.1|3840834|PseTd oalteromonas (ID: 108)

TABLE 18

| Elements | Sequences |
|---|---|
| tnsA | ATGTACATCCGGAACCTGCGGAAGCCCTCTCCAAA |
| | CAAGAACGTGTTCAAGTTCGCCAGCACCAAAGTGG |
| | GCAACGTGATCATGTGCGAGAGCACCCTGGAATTC |
| | AACGCCTGCTTCCACAACGAGTACAACGACCTGAT |
| | CGAGAGCTACGGCTCTCAGCCCGAGGGCTTTAAGT |
| | ACGAGTTCATGGGCAAGAGCCTGCCTTACACACCC |
| | GACACCGTGGTGGTGTACAAGGATAAGTGCGTGAA |
| | GTACCACGAGTATAAGTACGAAACCGAGACAGCCG |
| | AGCCTCTGTTCAGAGAGAGATTCAGCGCCAAGAGA |
| | GCCGCCTGCCTGAAGATGGGAGTGCAGCTGATCCT |
| | GGTCACCGAGAACCAGATCACCAAAGGACTGGCCC |
| | TGAACAACTTCAAGCTGCTGCACAGATACAGCGGC |
| | GTGTACGGCATCAAGAACATCCAGAGCGAGATGCT |
| | GAACTTCATCAACAAGAGCGGCGCCATCAACCTGG |
| | TGGACGTGAAGTCCCAGTTCAACCTGAGCATCGGC |
| | GAGGCCAGAAGCTTCCTGTACGCCCTGCTTCACAA |
| | GGGCCTGCTGAAAGCCGACCTGGAAGATGACGACC |
| | TGAGCAACAACCCCACACTGTGGGTCACCCCTTGA |
| | (SEQ ID NO: 345) |
| tnsB | ATGGGCTACACCATGACCGATTTCTTCGACGAGTT |
| | CAACGAGTCTCTGGCCCCTCTGAAGCCCCAGACAC |
| | CTACCAGATACCTGAAGCTGGACGACGCCAACCTG |
| | ATCAAGAGAGATCTGGACACCTTCAGCAACACCCT |
| | GAAGAACGAGGCCCTGCAGCGGTACAAGCTGATCA |
| | TCAGCATCGACAAGAAGCTGAGCGCCGGCTGGACC |
| | CAGAGAAACCTGGATCCTATCCTGGACGAGATCTT |
| | CAAAGAGGACGAGCAGGCCAGACCTAACTGGCGGA |
| | CAGTTGCCAGATGGCGGAAGAAGTACATCGAGAGC |
| | AACGGCGATCTGGCCAGCCTGGTGGTCAAGAACCA |
| | CAAGATGGGCAACAGAAACAAGCGGATCGAGGGCG |
| | ACGAGAGCTTCTTCGACAAGGCCCTGGAAAGATTC |
| | CTGGACGCCAAGAGGCCTACAATCGCCACCGCCTA |
| | CCAGTACTACAAGGACCTGATCGTGATCGAGAACG |
| | AGAGCATCGTGGAAGGCAAGATCCCCATCATCAGC |
| | TACACCGCCTTCAACAAGCGCATCAAGGCCATTCC |
| | TCCATACGCCGTGGCCGTGGCCAGACACGGAAAGT |
| | TTAAAGCCGACCAGTGGTTCGCCTACTGCGCCGCT |
| | CATGTGCCTCCAACCAGGATTCTGGAACGCGTGGA |
| | AATCGATCACACCCCTCTGGATCTGATCCTGCTGG |
| | ACGATGAGCTGCTGATCCCTATCGGCAGACCCTAC |
| | CTGACACTGCTGATCGACGTGTTCAGCGGCTGCGT |
| | GCTGGGCTTTCACCTGAGCTACAAGAGCCCCAGCT |
| | ATGTGTCTGCCGCCAAGGCTATTGCCCACGCCATC |
| | AAGCCTAAGAGCCTGGATGCCCTGAACATCCAGCT |
| | GCAGAACGACTGGCCTTGCTTCGGCAAGTTCGAGA |
| | ACCTGGTGGTGGACAACGGCGCCGAGTTCTGGTCC |
| | AAGAATCTGGAACACGCCTGTCAGTCCGCCGGCAT |
| | CAACATCCAGTACAACCCTGTGCGGAAGCCCTGGC |
| | TGAAGCCCTTCATCGAGAGATTCTTTGGCGTGATG |
| | AACCAGTACTTCCTGCCTGAGGTGCCCGGCAAGAC |
| | CTTCTCCAACATCCTGGAAAAAGAAGAGTACAAGC |
| | CCGAGAAGGACGCCATCATGCGGTTCAGCACCTTC |
| | GTGGAAGAGTTCCACAGATGGATCGTGGACGTGTA |
| | CCACCAGGACAGCAACAGCAGAGAGACACGGATCC |
| | CAATCAAGCGGTGGCAGCAGGGCTTCGATGTGTAC |
| | CCTCCTCTGACCATGAACGAGGAAGATGAGGCCCG |
| | GTTCACCATGCTGATGCGGATCAGCGACAGCAGAA |
| | CCCTGACCAGAAACGGCATCAAGTACCAAGAGCTG |
| | ATGTACGACAGCACAGCCCTGGCCGACTACCGGAA |
| | GCACTACCCTCAGACCAAAGAGACACTGAAGAAAC |
| | TGATCAAGGTGGACCCCGACGACATCAGCAAGATC |
| | TACGTGTACCTGGAAGAACTCGAGAGCTATCTCGA |
| | GGTGCCCTGCACCGATCCTACCGGCTATACAGATG |
| | GCCTGAGCATCTACGAGCACAAGACCATCAAGAAA |
| | GTCAACCGGGAAACCATCCGCGAGAGCAAGAATAG |
| | CCTGGGGCCAAGATCACCGCCGTGAAGAAGCAGGC |
| | CCAGATTGCCGACGTGTCCAATACCGGCAAGGGCA |
| | CCATCAAGGTGTCCCTCGCCAAAGCCAGAATGGCC |
| | ATCCACGAGAGAGTGAAGCAAGAACAAGAGGTGTT |
| | CATTGCCAGCAAGACCAAGGCCAAGATCACCGCCG |
| | TGAAGAAGCAGGCCCAGATTGCCGACGTGTCCAAT |
| | ACCGGCAAGGGCACCATCAAGGTGTCCGAGGAATC |
| | TGCCGCTCCTGTGCACAAGAACATCTCCAACGACG |
| | CCTTCGACGACTGGGACGACGATCTGGAAGCCTTC |
| | GAGTGA |
| | (SEQ ID NO: 346) |
| tnsC | ATGAATGCCCTGACCGAGATCCAGATCGAGCAGCT |
| | GAGAAACTTCAGCGACTGCATCGTGATGCACCCTC |
| | AGATCAAGGCCATCTTCAACGACTTCGACGAGCTG |
| | CGGCTGAACCGGAAGTTCCAGTCTGATCAGCAGGG |
| | AATGCTGCTGATCGGCGATACAGGCGTGGGCAAGA |
| | GCCACACCATCAACCACTACAAGAAACGCGTGCTG |
| | GCCACACAGAACTACAGCCGGAATACCATGCCTGT |
| | GCTGATCTCCCGGATCTCCAGAGGCAAAGGCCTGG |
| | ACGCCACACTGATTCAGATGCTGGCCGACCTGGAA |
| | CTGTTCGGCAGCAGCCAGATGAAGAAGCGGGGCTA |
| | CAAGACCGAGCTGACCAAGAAACTGGTGGAAAGCC |
| | TGATTAAGGCCCAGGTGGAACTGCTGATTATCAAC |
| | GAGTTCCAAGAGCTGATCGAGTTCAAGTCCGTGCA |
| | AGAGCGGCAGCAGATCGCCAACGGCCTGAAGTTCA |
| | TCAGCGAAGAGGCCAAGGTGCCCATCGTGCTCGTT |
| | GGAATGCCTTGGGCCGCCAAGATTGCCGAGGAACC |
| | TCAGTGGGCCTCTAGACTCGTGCGGAAGCGGAAGC |
| | TGGAATACTTTAGCCTGAAGAACGACAGCAAGTAC |
| | TTCCGGCAGTACCTGATGGGCCTCGTGAAGCAGAT |
| | GCCCTTCGATGAGCCTCCTAAGCTGGAAAGCAAGC |
| | ACACCACAATGGCCCTGTTCGCCGCCTGCAGAGGC |
| | GAGAATAGAGCCCTGAAACATCTGCTGATGGAAGC |
| | CCTGAAGCTGGCCCTGAGCTGCAACGAGTACCTGG |
| | AAAACAAACACTTTATCGCCGTGTACGAGAAGTTC |
| | GACTTCTTCAATGACAAGGACAGCCTGAAGCTCAA |
| | GAACCCCTTCAAGCAGGACATCAAGGATATCATCA |
| | TCTACGAAGTCACCAAGAACAGCAGCTACAACCCC |
| | AACGCTCTGGACCCCGAGGATATGCTGACCGGCAG |
| | AAAGTTCGCCATCGTGAAGTGA |
| | (SEQ ID NO: 347) |
| tnsD | ATGGCCTTCCTGTTCAGCCCTAAGGCCAGAGCCTT |
| | TAGCGACGAGAGCCTGGAAAGCTACCTGCTGAGAG |
| | TGGTGTCCGAGAACTTCTTCGACAGCTACGAGGGC |
| | CTGAGCCTGGCCATCAGAGAGGAACTGCACGAGCT |
| | GGATTTTGAGGCCCACGGCGCCTTTCCAATCGACC |
| | TGAAGAGACTGAACGTGTACCACGCCAAGCACAAC |
| | AGCCACTTCCGGATGAGAGCCCTGGGCCTGCTGGA |
| | AACACTGCTGGACCTGCCTAGATACGAGCTGCAGA |
| | AACTGGCCCTGCTGAAGTCCGACATCAAGTTCAAC |
| | AGCAGCGCCGCTCTGTACAAGAACGGCGTGGACAT |
| | CCCTCAGAAGTTCATCAGATACCACACCGAGGCCG |
| | CCGTGGACAGCATTCCTGTTTGTCCTCAGTGCCTG |
| | GCCGAGGAAGCCTACATCAAGCAGAGCTGGCACAT |
| | CAAATGGGTCGACGCCTGCACCAAGCACCAGTGTA |
| | CTCTGGCCCACAACTGCCCTGAGTGCTGCGCCCCT |
| | ATCAACTACATCGAGAACGAGAGCATCACCCACTG |
| | CAGCTGCGGCTTTGAACTGACCTGGGCCAGCACAA |
| | GCCCTGTGAATGCCCTGTCTATCGAGCACCTGAAC |
| | AAGCTGCTGGACAAGAGCGAGCGGAACGACAGCCA |
| | CAGCCTGTTCAACAACACCACACTGACCGAGAGAT |
| | TCGCTGCCCTGCTGTGGTATCAGGGCAGATACAGC |
| | CAGACCGACAACTTCTGCCTGGACGACGCCGTGGA |
| | TTACTTCAGCATGTGGCCTGCCGTGTTCTACAAAG |
| | AGCTGGACGAGCTGAGCAAGAACGCCGAGATGAAG |
| | CTGATCGACCTGTTTAACAAGACCGAGTTCAAGTT |
| | CATCTTCGGCGACGCCATCCTGGCCTGTCCTAGCA |
| | CACAGATGCAGAGAGAGCTGCACTTCATCTACAGA |
| | GCCCTGCTGGACTACCTGGTCACCCTGGTGGAAGG |
| | CAATCCCAAGGCCAAGAAGCCCAACACCGCCGATC |
| | TGCTGGTGTCTGTGCTGGAAGCTGCTACCCTGCTG |
| | GGCACATCTGTGGAACAGGTGTACCGGCTGTACCA |
| | GGACGGCATTCTGCAGACCGCCTTCCGGCACAAGA |
| | TGAACCAGCGGATCAACCCCTACAAGGGCGTGTTC |
| | TTCCTGCGGCACGCCATCGAGTACAAGACCAGCTT |
| | CGGCAACGACAAGGCCCGGATGTATCTGAGCGCTT |
| | GGTGA |
| | (SEQ ID NO: 348) |

[0103] 45463|26|GCA_000279285.1_ASM27928v1_genomic|ALED01000027.1|102357 6|Vibrio (ID: 109)

TABLE 19

| Elements | Sequences |
|---|---|
| tnsA | ATGACCAGCCTGCCTACACCTAGCGCCATCACAAC |
| | AAGCGCCCTGGAATACGCCTTTCACACCCCTGCCA |
| | GAAACCTGACCAAGAGCCGGGGCAAGAACATCCAC |
| | AGATACGTGTCCGTGAAGATGAGCAAGCGGATCAC |
| | CGTGGAAAGCACACTGGAATGCGACGCCTGCTACC |
| | ACTTCGACTTCGAGCCTAGCATCGTGCGGTTCTGC |
| | GCCCAGCCTATCCGGTTCCTGTACTACCTGAATGG |
| | CCAGAGCCACAGCTACGTGCCCGATTTCCTGGTGC |
| | AGTTCGACACCAACGAGTTCGTGCTGTACGAAGTG |
| | AAGTCCGCCTACGCCAAGAACAAGCCCGACTTCGA |
| | CGTGGAATGGGAAGCCAAAGTGAAAGCCGCCACAG |
| | AGCTGGGCCTCGAGCTGGAACTGGTGGAAGAGAGC |
| | GACATCAGAGACACCGTGGTGCTGAACAACCTGAA |
| | GCGGATGCACAGATATGCCAGCAAGGACGAGCTGA |
| | ACAATGTGCACAACAGCCTGCTGAAGATCATCAAG |
| | TACAACGGCGCCCAGAGCGCCAGATGTCTGGGAGA |
| | ACAACTGGGCCTGAAGGGCAGAACCGTGCTGCCTA |
| | TCCTGTGCGACCTGCTGTCTAGATGCCTGCTGGAC |
| | ACCAGACTGGACAAGCCCCTGAGCCTGGAAAGCAG |
| | ATTCGAGCTGGCCTCCTACGGCTGA |
| | (SEQ ID NO: 349) |
| tnsB | ATGGCCAAGAAGGGCTTCAGCAGCTTCCACAGAAA |
| | GGCCGTGTCCAGCCAGGACACCCTGGAATCCATTG |
| | AGCTGGTGTCCAGCGCCAACTGCCTGGAAAGCGTG |
| | ACCTACCAGGACATCAGCGCCTTTCCAGAGACAAT |
| | CGCCGTGGAAATCAACTTCCGGCTGAGCATCCTGC |
| | GGTTTCTGGCCCGGAAGTGCGAGACTATCGTGGCC |
| | AAGTCTATCGAGCCCCACAGAGTGGAACTGCAGCA |
| | GAACTACTCCCGGAAGATCCCCAGCGCCATCACCA |
| | TCTACAGGTGGTGGCTGGCCTTCAGAAAGAGCGAC |
| | TACAACCCCATCTCTCTGGCCCCTAACATCAAGGA |
| | CCGGGGCAACAGAGAAACAAAGGTGTCCACCGTGG |
| | TGGACTCCATCATGGAACAGGCCGTCGAGAGAGTG |
| | ATCAGCGGCCGGAAAGTGAATGTGTCCTCCGCCTA |
| | CAAGCGCGTGCGGAGAAAAGTGCGGCAGTACAATC |
| | TGACCCACGGCACCAAGTACACATACCCTAAGTAC |
| | GAGAGCGTGCGCAAGCGGGTCAAGAAGAAAACCCC |
| | TTTCGAGCTGCTGGCCGCTGGCAAGGGCGAAAGAG |
| | TGGCCAAGCGCGAGTTCAGACGGATGGGCAAGAAG |
| | ATCCTGACCAGCAGCGTGCTGGAACGGGTCGAGAT |
| | CGATCACACAGTGGTGGACCTGTTCGCCGTGCACG |
| | AAGAGTACAGAATCCCTCTGGGCAGACCCTGGCTG |
| | ACCCAGCTGGTGGATTGCTACTCTAAGGCCGTGAT |
| | CGGCTTCTACCTGGGCTTCGAGCCTCCTAGCTACG |
| | TGTCAGTGTCACTGGCCCTGAAGAACGCCATCCAG |
| | AGAAAGGACGACCTGATCAGCAGCTACGAGAGCAT |
| | CGAGAACGAGTGGCTGTGCTACGGCATCCCCGATC |
| | TGCTCGTGACCGACAACGGCAAAGAGTTCCTGAGC |
| | AAGGCCTTCGACCAGGCCTGTGAAAGCCTGCTGAT |
| | TAACGTGCACCAGAACAAGGTGGAAACCCCTGACA |
| | ACAAGCCCCACGTGGAACGGAACTACGGCACCATC |
| | AATACCAGCCTGCTGGACGATCTGCCCGGCAAGAG |
| | CTTTAGCCAGTACCTGCAGAGAGAAGGCTACGACA |
| | GCGTGGGCGAAGCCACACTGACCCTGAACGAGATC |
| | AGAGAGATCTACCTGATTTGGCTGGTGGACATCTA |
| | CCACAAGAAGCCCAACCAGCGGGGCACCAACTGTC |
| | CTAATGTGGCCTGGAAGAAAGGCTGCCAAGAGTGG |
| | GAGCCCGAGGAATTCAGCGGCAGCAAGGACGAGCT |
| | GGACTTCAAGTTCGCCATCGTGGACTACAAGCAGC |
| | TGACCAAAGTGGGCATCACCGTGTACAAAGAGCTG |
| | AGCTACAGCAACGACCGGCTGGCCGAGTACAGAGG |
| | CAAGAAAGGCAACCACAAGGTGCAGTTCAAGTACA |
| | ACCCCGAGTGCATGGCCGTGATTTTGGCAGCACAA |
| | GTACAATATGAAGTACCAGGCCGAGCTGAACAGCG |
| | CCGAGTACGATGAGGACAAAGAGATCGACGGGGTG |
| | CTCGACGAGGACATGAACGAGTACTTCACCGTGAA |
| | TGCCATCGACTACGAGTACGCCAGCAGAGTGTCTC |
| | TGTGGCAGCACAAGTACAATATGAAGTACCAGGCC |
| | GAGCTGAACAGCGCCGAGTACGATGAGGACAAAGA |
| | GATCGACGCCGAGATCAAGATCGAGGAAATCGCCG |
| | ACCGGTCCATCGTCAAGACCAACAAGATCAGAGCC |
| | AGGCGGAGAGGCGCCAGACACCAAGAGAATTCTGC |
| | CAGAGCCAAGAGCATCAGCAACGCCAATCCTGCCA |
| | GCATCCAGAAGCACGAGGACGAGATCGTGTCCGCC |
| | GACAACGACGACTGGGACATCGATTACGTGTGA |
| | (SEQ ID NO: 350) |
| tnsC | ATGAGCGAGACAAGAGAGGCCAGAATCAGCAGAGC |
| | CAAGCGGGCCTTTGTGTCTACACCTAGCGTGCGGA |
| | AGATCCTGAGCTACATGGACAGATGCCGGGACCTG |
| | AGCGACCTGGAATCTGAGCCTACCTGCATGATGGT |
| | GTACGGCGCTTCTGGCGTGGGCAAGACCACCGTGA |
| | TCAAGAAGTACCTGAACCAGAATCGGAGAGAGAGC |
| | GAGGCTGGCGGCGATATCATTCCCGTGCTGCACAT |
| | CGAGCTGCCCGACAATGCCAAGCCTGTTGACGCCG |
| | CTAGAGAACTGCTGGTGGAAATGGGCGATCCCCTG |
| | GCTCTGTACGAGACAGACCTGGCCAGACTGACCAA |
| | GAGACTGACCGAGCTGATTCCTGCCGTGGGCGTGA |
| | AGCTGATCATCATCGACGAGTTCCAGCACCTGGTG |
| | GAAGAACGGTCCAACCGGGTGCTGACCCAAGTCGG |
| | CAATTGGCTGAAGATGATCCTGAACAAGACCAAGT |
| | GTCCCATCGTGATCTTCGGCATGCCCTACAGCAAG |
| | GTGGTGCTGCAGGCCAATTCTCAGCTGCACGGCCG |
| | GTTCAGTATTCAGGTGGAACTGCGGCCCTTCAGCT |
| | ACCAAGGTGGAAGAGGCGTGTTCAAGACCTTCCTG |
| | GAATACCTGGACAAGGCCCTGCCTTTCGAGAAGCA |
| | GGCCGGACTGGCCAATGAGAGCCTGCAGAAGAAGC |
| | TGTACGCCTTCAGCCAGGGCAACATGCGGAGCCTG |
| | AGAAACCTGATCTACCAGGCCAGCATCGAGGCCAT |
| | CGACAACCAGCACGAGACAATCACCGAAGAGGACT |
| | TCGTGTTCGCCAGCAAGCTGACCAGCGGCGACAAG |
| | CCCAACAGCTGGAAGAACCCTTTCGAAGAGGGCGT |
| | CGAAGTGACCGAGGACATGCTCAGACCTCCACCTA |
| | AGGACATCGGCTGGGAAGATTACCTGCGGCACAGC |
| | ACCCCTAGAGTGTCCAAGCCTGGCCGGAACAAGAA |
| | CTTCTTCGAGTGA |
| | (SEQ ID NO: 351) |
| tnsD | ATGTTCCTGCAGCGGCCCAAGCCTTACTCCGACGA |
| | GAGCCTGGAAAGCTTCTTCATCAGAGTGGCCAACA |
| | AGAACGGCTACGGCGACGTGCACAGATTTCTGGAA |
| | GCCACCAAGCGGTTTCTGCAGGACATCGACCACAA |
| | CGGCTACCAGACATTCCCCACCGACATCACCCGGA |
| | TCAACCCCTACAGCGCCAAGAATAGCAGCAGCGCC |
| | AGAACCGCCAGCTTTCTGAAACTGGCCCAGCTGAC |
| | CTTCAACGAGCCTCCTGAACTGCTGGGCCTCGCCA |
| | TCAACCGGACCAACATGAAGTACAGCCCTAGCACC |
| | AGCGCCGTCGTTAGAGGCGCTGAAGTGTTCCCTAG |
| | AAGCCTGCTGCGGACCCACAGCATCCCTTGCTGTC |
| | CTCTGTGCCTGAGAGAGAATGGCTACGCCAGCTAC |
| | CTGTGGCACTTCCAAGGCTACGAGTACTGCCACAG |
| | CCACAACGTGCCCCTGATCACCACATGCAGCTGCG |
| | GCAAAGAATTCGACTACAGAGTGTCCGGCCTGAAG |
| | GGCATCTGCTGCAAGTGCAAAGAGCCCATCACACT |
| | GACCAGCAGAGAGAACGGACACGAGGCCGCCTGTA |
| | CCGTGTCTAATTGGCTGGCCGGACATGAGAGCAAG |
| | CCCCTGCCTAATCTGCCCAAGAGCTACAGATGGGG |
| | CCTCGTGCATTGGTGGATGGGCATCAAGGACAGCG |
| | AGTTCGACCACTTCAGCTTCGTGCAGTTCTTCAGC |
| | AACTGGCCCCGGTCCTTCCACTCCATCATCGAGGA |
| | CGAGGTGGAATTCAACCTGGAACACGCCGTGGTGT |
| | CCACCAGCGAGCTGAGACTGAAAGACCTGCTGGGC |
| | AGACTGTTCTTCGGCAGCATCAGACTGCCCGAGAG |
| | AAACCTGCAGCACAACATCATCCTGGGCGAGCTGC |
| | TGTGCTACCTGGAAAACAGACTGTGGCAGGACAAG |
| | GGCCTGATCGCCAACCTGAAGATGAACGCCCTGGA |
| | AGCTACCGTGATGCTGAACTGCAGCCTGGACCAGA |
| | TCGCCAGCATGGTGGAACAGCGGATCCTGAAGCCT |
| | AACCGGAAGTCCAAGCCTAACAGCCCTCTGGACGT |
| | GACCGACTACCTGTTCCACTTCGGCGACATCTTTT |
| | GCCTGTGGCTGGCTGAGTTCCAGAGCGACGAGTTC |
| | AACCGCAGCTTCTACGTGTCCCGGTGGTGA |
| | (SEQ ID NO: 352) |

[0104] 64545|3|GCA_000695255.1 Phalotolerans2753_genomic|JMIB01000004.1|33903 8|PhotobacteriTm (ID: 110)

TABLE 20

| Elements | Sequences |
|---|---|
| tnsA | ATGTACAAGCGGAACCTGAAGCACAGCAGAGTGAA |
| | GAACCTGTTCAAGTTCGTGTCCGCCAAGATGAACA |
| | GCGTGCTGCTGGTGGAAGGCAGCCTGGAATTCGAT |
| | ACCTGCTTCCACCTGGAATACTCCCCACACATCCA |
| | GAGCTTCGAGGCCCAGCCTGTGGGCTTCTTCTACC |
| | AGTACCTGAACCGGGACTGCCCCTACACACCCGAC |
| | TTCAAGATCATCGAGAAGGGCGTGATCAAGTACAT |
| | CGAAGTGAAGCCCTGGGAGAAAACCCTGAAAGAGG |
| | ACTTCCTGCTGCGGTTCCCTGCCAAGCAGCAGAAA |
| | GCTGCCGAGCTGGGAATCACCCTGGTGCTGATCAC |
| | CGAGAAGCAGATTAGAGTGAACCCCGTGCTGAACA |
| | ACCTGAAGGCCCTGCACAGATACAGCGGCTTCCAG |
| | TCCTTCACACCCCTGCACACCCTGTTTCTGAGCCT |
| | GGTGCAGAGACTGGGCAGAGTGTCCATCAATGAGG |
| | CCGCCAAACAGCTGATGATCGAGCGGCCCCTGATC |
| | CTGAAAACAGCCCTGAGCCTGATCAGCAGCGGCGT |
| | GATCTCTGCCAACCTGGTCAATGAGGAACTGGGCC |
| | TGAACTCCGTCGTGTGGTCCAAGAGCTACGAGAGC |
| | TGA |
| | (SEQ ID NO: 353) |
| tnsB | ATGAGCCACGAGAAAGAAGTGGGCGTTTTCGGCGA |
| | CGAGTTCCAGACCGTGATCGAGTTCGACAAGCACA |
| | GCGAGGGCAGCCTGTCTACACACGGCACCGTGAAT |
| | AGAGATCTGGCCAGCTACAGCACCGAGATCCAGAG |
| | CGAAGTGATGCGGCGGTACAGATTCATCGAGTGGA |
| | TCCGGAAGAGAGTGAAAGGCGGCTGGACCGAGAAG |
| | AACCTGAACAGCCTGATTCGGCAGGCCGCCATCGA |
| | GCTGAAACTGGAACCTCCTAGCTGCAGAACACTGG |
| | CCCGGTGGTGGAAGAGATACAGCGAGGCCAACTTC |
| | AGCCTGATGAGCCTGCTGCCTAACAACAGCAACAA |
| | GGGCAACAGAAAGCAGAAGGTGGCCAACGACAGCG |
| | TGTTCTTCGAGCGGGCCATCGAGAGATACCTGGTG |
| | CCTGAGAGGCCTTCTATCGCCGCCGTGTACGAGTA |
| | CTACAGCGACCTGATCAGAATCGAGAACCAGAGCC |
| | TGGTGGACGGCAAGATCAAGCCCGTGTCCTACAAG |
| | GGCTTCTACAACAGAGTGAAGAAGCTGCCCGCCTA |
| | CGAGGTGGTGCTGGCTAGACACGGAAAGTACCAGG |
| | CCGACATGGAATTCAACAAGATCGACGCCCACATG |
| | CCTCCAAGCAGAGTGCTGGAAAAGGTGGAAATCGA |
| | TCACACCCCTCTGGACCTGATCCTGCTGGACGATG |
| | AGCTGAAGCTGCCTATCGGCAGACCCTACCTGACA |
| | CTGCTGATCGACCAGTACAGCAAGAGCATCATCGG |
| | CTTCCACCTGGGCTACAACCAGCCTAGCTACTACT |
| | CCGTGATGAAGGCCATCCTGAACGCCATCAAGCCC |
| | AAGGACTACGTGAAAGAGCGCTACCCCAGCATCGA |
| | GCACGACTGGTATTGCCAGGGCAAGATGGAAACCC |
| | TGGTGGTGGACAACGGCCCTGAGTTTTGGGGCGGA |
| | TCTCTGGAACAGGCCTGCCTGGAAGTGGGCATCAA |
| | CATCCAGTTCAACCCCGTGCGGAAGCCCTGGCTGA |
| | AAGCTCTGGTGGAACGGATCTTCCGGACCATCAGC |
| | AGCAAGCTGCTGGTCAACATCCCCGGCAAGACCTT |
| | CAGCAACATCATGGAAAGAGCCGGCTACGACCCCA |
| | CCAAGGATAGCGTGATGACCTTCTCCGTGTTCGAC |
| | GAGCTGTTCCACAAATGGGTCATCGACGTGTACCA |
| | CTACGAGACAGACACCCGGAAGCGGCTGATCCCTC |
| | ACCTGAAATGGCAAGAGGGCGTGTCCATGATGCCA |
| | CCTATCAGCTACCAGCCTGAGGACCTGGAAAAGCT |
| | GAGCGTGATCCTGGGACTGCAGGCCTTCAGAAAGC |
| | ACAGAAGAGGCGGCATCCATCTGCACGGCCTGAGA |
| | TACGACAGCCAGGATTTCGCCGCCTACCGGCGGAT |
| | GAACCCTAGAGACACAGTGATCCTGACCAAGACAG |
| | ACCCCGACGACATCAGCTCCATCTATGTGTACCTG |
| | GAAAGAGAGCGGCACTACCTGAAGGTGCCCTGCAT |
| | CGATCCTATCGGCTACACCAAGGGCCTGAGAAGCC |
| | AGAATCTACATCCACGAGCGGATCGTGCGGGAAAC |
| | CGAGGAACTGAACCAGCTGCACAGAAGCAGACCCA |
| | ACCTGGACAACCACCTGAAGTTTAAGCTGCTGTAC |
| | CGGGACTACATCAGCCGGCACACAGATCTGGATGG |
| | CCTGGCCAAAGCCAGAATCTACATCCACGAGCGGA |
| | TCGTGCGGGAAACCGAGGAACTGAACCAGCTGCAC |
| | AGAAGCAGACCCAAGAGAACCACAGGCGGCATGGC |
| | CAGACTGGCTAAGCACAATGGCGTGCGGAGCGATT |
| | CCGATGCCTCTTGTGTTCCTGAGGCTCTGCCCGCT |
| | CTGAATGTGAAAGAACAGAAAAACCCTCAGAAGGC |
| | CCTGCCTGACAGCGACGAGTGGGACGACTTTATCT |
| | CCAAGCTGGACCCCTACTGA |
| | (SEQ ID NO: 354) |
| tnsC | ATGTTCTCTCTGAGCCCCGAGAACGAGTTCAAGTA |
| | CCAGATGTTCGTGGACGTGTTCGTCGAGCTGCCTA |
| | TCGCCACCACCGTGATGAACGACTTCGACCGGCTG |
| | CGGTACAACAGAAAGTTCGGCGGCGATCAGCAGTG |
| | CATGCTGCTGACAGGCGATACAGGCAGCGGCAAGA |
| | GCTTCCTGATCCAAGAGTACTGCAGACGGGTGCTG |
| | CAGACCAGCCAGAATCCTGCTGCTGTGCTGAGCAG |
| | CAGAATCCCCAGCAAGCCCACACTGGAAAGCACCA |
| | TCATCGAGCTGCTGAAGGACCTGGGCCAGTTTGGC |
| | GCCGTGTACAGAAAGGGCAAGAGCAAGGATCAGAG |
| | CCTGACCGAGAGCCTGCTGAGAAGCCTGAAGTCCA |
| | AGAACACCGAGCTGATCATCATCAACGAGTTCCAA |
| | GAGCTGGTCGAGTTCCAGTCCGGCAGAGCCCTGTC |
| | TGAGATCGCCACACGGCTGAAGTACATCAGCGAAG |
| | AGGCCACCGTGCCTATCGTGCTCGTTGGAATGCCT |
| | TGGGCCGCCAAGATTGCCGAGGAACCTCAGTGGTC |
| | TAGCCGGCTGCTGATCAGAAGAGAGCTGCTGTACT |
| | TTAAGCTGAGCCAAGAGCCTGAGCAGTTCATCAGA |
| | TTCGTGAAGGGCCTGCTGAAGCGGATGCCCTTCAA |
| | TGAAGCCCCTCAGCTGGACGGCAAGCAGATGATTC |
| | TGGCCCTGTTTAGCGCCAGCCACGGCCAGATTAGA |
| | AGGCTGAAGCAGATCCTGAACCTGGCCGTGCAGCA |
| | GGCATTGGCCGAAGAGGCTAGCACCGTGAATCAGC |
| | ACCATGTGGCCAGCGTGTTCGGCATGCTGTTCCCT |
| | AGTACCAAGAATCCCTTCCTGCTGTCCGCCAAAGA |
| | GATCGAGGGAACCGAAGTGGCCGTGCCTAGCCACT |
| | ATGATGTGGGCGCCGAGAATGAGTTTGACGCTGTG |
| | ATCCCCACACAGTACACCGACCTGCTGCCTCTGAG |
| | TCAGCTGCTGCGGAAGTCCAGAAAGACCAAGTGA |
| | (SEQ ID NO: 355) |
| tnsD | ATGTTCCTGATCACCCCTGACAAGCAGTACGCCGA |
| | CGAGAGCCTGGAAAGCTTCCTGATTAGAGTGTGCG |
| | AGTGCAACGGCTTCGAGAGCTTCCAACTGCTGTCT |
| | GGCGTTCTGTGGGCCTGGCTGGTGGAAAATGATCA |
| | TCAGGCTGCTGGCGCCCTGCCTAGAAAGCTGAGCC |
| | AGATCAATCTGTACCACGCCAAGCACAGCAGCGGC |
| | TTTAGAGTGCGGGCTATCCAGCTGCTGGACTCCCT |
| | GTTTGGCGGCGACATCAAGCCTCTGATGGGACACG |
| | CTGTGCTGCACTCCAGCGTGACCTTTTCTCCTGGA |
| | CTGGCCGCCGTGTTCAGAGATGGACTGCACATCCC |
| | CAGATGCTTTCTGAGCAGCCAGTGCGTGCCAGTGT |
| | GCTCTCAGTGTCTGGCCGAGCAGACCTACATCCGG |
| | CAGTTCTGGCACCTGATTCCTTACCAGGCCTGCCA |
| | TCTGCACGGCGTGAAGATGCTGTACCAGTGTCCTG |
| | AGTGTCAGCAGCCCCTGAACTACCAAGAGAGCGAG |
| | CAGATCAGCCTGTGCGCCTGTGGCTTTGAGCTGAG |
| | CAAGGTGGTCACAAAGCAGGCCAGCTGTGACCTGG |
| | TGGCCATCAGCAAGCTGATCGTGTCCGGCGACCAC |
| | GAGGGCAACAGAGATAGCAGCATCTCTCACTGGCT |
| | GGGAGCCCTGCTGTGGTTCAGCAGAAGGCAGAAGT |
| | CTAGCCCCAAGCGGGACGTGATGGACGAGAGCATG |
| | CTGTCTGAGGCCGTGGACTTCTTCAGCAGATGGCC |
| | TGTGGCCATGGTGGAAGAACTGGACCAGATTGTGC |
| | AGGGCGCTGCCCTGAAGCTGACAAAGAACTACAAC |
| | CACACCAAGTTCAGCGACGTGTTCGGCGATCTGCT |
| | GACCGCCACAAGAAAGCTGCCTAGCTCCGACCTGC |
| | ACCGGAACTTCGTGCTGAAAACCATCGTGGACTAC |
| | CTGGAACAGCTCGTGCGGAGCAACCCCAAGAAAGG |
| | CGAGGACAATATCGCCGATCTGCAGCTGAGCATCC |
| | TGGAAGCCTCTGCTCTGCTGAGCAGCAGCACCGAA |
| | CAGGTGTACCGGCTGTACGAAGAGGGCTACCTGCA |
| | GTGCAGCAAGAGACTGAAGCTGCACAGCAAACTGA |
| | GCAGCGACGATGCCGTGTTCTACCTGCGGCAGATC |
| | ATCGAACTGCGGAGAGCCGGAATCGCCAGCGACTA |
| | CAGCACCAACACAGTGTACCTGCCAAGCTGGTGA |
| | (SEQ ID NO: 356) |

[0105] 75502|1|GCA_001048675.1_VDIABv1_PRJEB5898_genomic|CCKK01000002.1|1038212|Vibrio (ID: 111)

TABLE 21

| Elements | Sequences |
|---|---|
| tnsA | ATGAGCAGCCTGAGACTGCCTAGCGCCATCACAAT |
| | CAGCGCCCTGGAACAGGCCTTCGACACCCCTGCCA |
| | GAAACCTGACAAAGAGCCGGGGCAAGAACATCCAC |
| | AGATTCACCAGCGCCAAGATGGGCAAGAGAATCAG |
| | CGTGGAAAGCACCCTGGAATGCGACGCCTGCTACC |
| | ACTTCGACTTCGAGCCTAGCATCGTGCGGTTCTGC |
| | GCCCAGCCTATCAGACTGAGCTACTTCATCAACGG |
| | CAAGCACCATACCTACGTGCCCGACTTCCTGGTGC |
| | AGTTCGATACCCACGAGTTCGTGCTGTACGAAGTG |
| | AAGTCCGACTACGCCAAGAACAAGAGCGACTTCGG |
| | CAGCGAGTGGGAAGCCAAAGTGCAGGCCGCTTCTG |
| | CCCTGGGAGTTGAGCTGGAACTTGTGGGCGAGAGC |
| | GACATCCGGGACAAAGTGATCCTGAAGAACCTGAA |
| | GCTGATGCACAGATACGCCAGCAGAGCCGACCTGA |
| | ACAACGTGCAGAAGTCCCTGCTGAGCACCCTGAAA |
| | CAGGATGGCGCCCAGACAGCCAAGTGTCTGGGAGA |
| | ACAGCTGGGCCTGAAGGGCAGAACCATCCTGCCTA |
| | TCCTGTGCGACCTGCTGTCCAGATGCCTGCTGGAC |
| | ACCAGACTGGACATGCCCCTGAGCCTGGAAAGCCA |
| | GTTTGAGCTGGGCAGCTACGCCTGA |
| | (SEQ ID NO: 357) |
| tnsB | ATGCCCAAGACCTTCAGCAGCTTCCACAGAAAGAG |
| | CGTGCCCAGCGAGCTGAAGCCCGAAGTGAACAAGG |
| | CCGTGATCAGAGCCAGCAGCCTGGAAGATGTGACC |
| | TACCAGGACATCAGCGCCTTTCCAGAGAAGATCAG |
| | CACCGAGATCACCTTCCGGCTGAATATCCTGCGGT |
| | TCCTGGGCAGAAAGTGCGAGAGAATCGTGCCCAAG |
| | AGCATCGAGCCCCACAGAATCGAGCTGCAGAGAAA |
| | CCACGTGCGGAAGATCCCTAGCGCCATCACCATCT |
| | ACAGGTGGTGGCTGGCCTTCAGAGAGAGCGACTAC |
| | AACCCCACATCTCTGGCCCCTGACTTCAAAGGCAG |
| | AGGCAACCGGGATACCAAGGTGTCCACAATCGTGG |
| | ACGCCATCATGGAACAGGCCGTGGAAAGAGTGATC |
| | AGCGGCCGGAAGATCAACGTGAACAGCGCCCACAA |
| | GCGCGTGCGGAGAAAAGTGCGGCAGTACAACCTGA |
| | AGCACGGCACCAAGTACAAGTACCCTAAGTACGAG |
| | AGCGTCCGGAAGCGCGTGAAGAAGAAAACCCCTTA |
| | CGAACTGCTGGCCGCCAAAAAGGGCGAGAGAGTGG |
| | CCAAGCGCGAGTTCAGAAGAATGGGCAAGAGAATC |
| | CTGACCAGCAGCGTGCTGGAACGCGTGGAAATCGA |
| | TCACACCGTGGTGGACCTGTTCGCCGTGCACAAAG |
| | AGCACAGAATCCCTCTGGGCAGACCCTGGCTGACA |
| | CAGCTGGTGGATTGCTACAGCAAAGCCGTGATCGG |
| | CTTCTACCTGGGCTTCGAGCCTCCTAGCTACGTGT |
| | CAGTGTCACTGGCCCTGAAGAACGCCATCCAGAGA |
| | AAGGACGACCTGGTGTCCAGCTACGAGTCCATCGA |
| | GAACGAGTGGCTGTGCTACGGCATCCCCGATCTGC |
| | TCGTGACCGACAACGGCAAAGAGTTCCTGAGCAAG |
| | GCCTTCGACAAGGCCTGCGAGTCTCTGCTGATCGT |
| | GGTGCATCAGAACAAGGTGGAAACCCCTGACAACA |
| | AGCCCCACGTGGAACGGAACTACGGCACCATCAAT |
| | ACCAGCCTGCTGGACGATCTGCCCGGAAAGGCCTT |
| | CAGCCAGTACCTGGAAAGAGAAGGCTACGACAGCG |
| | TGAACGAGGCCACACTGACCCTGGACGAGATCAAA |
| | GAGATCTACCTGATCTGGCTGGTGGACATCTACCA |
| | CACCAAGCCTAACAAGCGGGGCACCAACTGTCCCA |
| | ACGTGGCATGGAAAAGGGGCTGCCAAGAGTGGGAG |
| | CCCGAAGAGTTTAGCGGCACAAAGGATGAGCTGGA |
| | CTTCAAGTTCGCCATTGCCGACCACAAGCAGCTGA |
| | ACAAAGGCGGCATCACATTCTGCAACGGCCTGGTG |
| | TACAGCAGCGAGAGGCGGTGCTCGACGAGGAAGAA |
| | CACGAGTACTTCACCGTGCCTGCCATCGACTACGA |
| | GTACGCCAGCGGAGTTTCTCTGTTGGCCGAGTACA |
| | GAGGCAAGAAAGGCAACCACAAAGTGAAGTTCAAG |
| | TACAACCCCGAGTGCATGGCCGTGATTTGGGTGCT |
| | CGACGAGGAAGAACACGAGTACTTCACCGTGCCTG |
| | CCATCGACTACGAGTACGCCAGCGGAGTTTCTCTG |
| | TGGCAGCACAAGTACAATATGAAGCACCAGGCTGA |
| | GCTGAACTCCGCCGACTACGACGAGGACAAAGAAA |
| | TCGACGCCGAGCTGCGGATCGAGGAAATCGCCGAT |
| | CAGAGCATCGTGAAGAACTGA |
| | (SEQ ID NO: 358) |
| tnsC | ATGGACAAGGACCGGGAAGTGCGGATCAGCAAGGC |
| | CAAGAAAGCCTTCGTGTCTACCCCTAGCGTGAAAA |
| | CCGTGCTGCGGTACATGGACAGATGCCGGGATCTG |
| | AGCGACCTGGATAGCGAGCCTACCTGCATGATGGT |
| | GTTTGGAGCCACAGGCGTGGGCAAGACCACCATCA |
| | TCAAGAAATACCTGATGCAGAACAAGCGGGACAGC |
| | GACGCCAAGGGCGATATGATTCCTGTGCTGCACAT |
| | CGAGCTGCCCGACAACGCCAAACCTGTGGATGCCG |
| | CTAGAGAACTGCTGCTGGAAATGGGCGATCCCCTG |
| | GCTCTGTACGAGACAGACCTGGCCAGACTGACCAA |
| | GAAGCTGACCGATCTGATCCCTGCCGTGGGCGTCA |
| | GACTGATCATCATCGACGAGTTCCAGCACCTGGTG |
| | GAAGAGAAGTCCAACCGGGTGCTGACCCAAGTCGG |
| | CAACTGGCTGAAGATGATCCTGAACAAGACCAAGT |
| | GTCCCATCGTGCTGTTCGGCATGCCCTACAGCAAA |
| | GTGGTGCTGCAGGCCAACTCTCAGCTGCACGGCAG |
| | ATTCAGCATCCAGTTCGAGCTGCGGCCCTTCAGCT |
| | ACGAGGAAGGCAACGGCGTTTTCAAGACCTTCCTG |
| | GAATACCTGGACAGAGCCCTGCCTTTCGAGAAAGA |
| | AGCCGGACTGGCCAGAGAGAGCCTGACCAAAAAGA |
| | CCATCTGCCTGTTCAGCCGGAAGCACGCCTTCATC |
| | GAGAAGCCCAACCTGAGCAGCATCTACTGA |
| | (SEQ ID NO: 359) |
| tnsD | ATGACCGACAAGAAAACCATCAGCACCAAGAGCAG |
| | CAACAACAACCACAAGGCCACCAGCACCGTGTCTA |
| | GCTGGCTGGCCGGAAATACCAGCAAGGTGCTGCCC |
| | AATCTGCCCCAGAGCTATAGATGGGGACTCGTGCA |
| | CTGGTGGTGCCACATCAGCGACAACAAGTTCGAGC |
| | ACTTCAGCTTCGTGCAGTTCTTCAGCAACTGGCCC |
| | AGCAGCTTCCACAGCATGATCGACAGCGAGATCGA |
| | GTTCAACCTGGAACACGCCATCGTGGGCAGAAAGG |
| | GCCTGAGAGTGAAGGACCTGCTGGGCAGAATCTTC |
| | TTCAACAGCGTGCGGCTGCCCGAGAGAAACCTGCA |
| | GCATAACATCGTGCTGCAAGAGCTGCTGCGGCACA |
| | TCGAGACACACCTGTGGGACAACAATGGCCTGCTG |
| | GCCAACCTGAGAATGAACGCCCTGGAAGCCGCCGT |
| | GTTCCTGAACTGCAACATCGATGAGGTGGCCAGCA |
| | TGGTGGAACAGCGGATCCTGAAGCCTAGCAGAAAG |
| | ACCAAGCCTAACACACCCCTGGCCGTGAACAACTA |
| | CCTGTTCTACTTCGGCGACATCTTCTGCCTGTGGC |
| | TGGCTGAGTTCCAGACCGACGAGTTCAATCGGAGC |
| | TTCTACGTGTCCCGGTGGTGA |
| | (SEQ ID NO: 360) |

[0106] 87347|8|GCA_001293805.1_ASM129380v1_genomic|BCAI01000009.1|190431|PseTdoalteromonas (ID: 112)

TABLE 22

| Elements | Sequences |
|---|---|
| tnsA | ATGTACCGGCGGAAGCTGAAGCACAGCAGAGTGAA |
| | GAACCTGTTCAAGTTCGCCAGCCAGAAGAACAAGG |
| | CCACCTGTCTGGTGGAAAGCGCCCTGGAATTCGAC |
| | GCCTGCTTCCACTTCGAGTACAGCCCTGCCATCGT |
| | GGCCTTTGAAGCTCAGCCCCTGGGCTTTAAGTACG |
| | ACTTCGAGGGCAGAACATGCCCCTACACACCCGAC |
| | TTTCTGCTGACCCACTCTGACGGCACCCAGAAGTA |
| | CATCGAGATCAAGCCCGTGAAAGAGCTGGCCAAGG |
| | ACGAGTTCCGGCAGAGATTCGAGCTGAAACAGCTG |
| | GCTAGCAAGCAGCTGGGCATCGAGCTGATCCTGGT |
| | CACCGACAAGCAGATCAGAGTGTTCCCCGTGCTGG |
| | ACAACCTGAAGCTGCTGCACAGATACAGCGGCTTC |
| | CAGGTGCTGACCGAGCTGCACACAGTGGTCGTGGG |
| | ACTCGTGAAGTCTACCGGCCTGGTCAAAGTGGCCC |
| | AGCTGGTCAACTACCTGAAGGTGTCAGCTGGCGAG |
| | GTGCTGTCTATCGTGGCCAGACTGCTGTGTATCGG |
| | ACAGCTGGCCACCGACCTGACAACAGATGCCCTGA |
| | GCCTGGACTCTGTGATCTGGGCCTCTGACGAGCAG |
| | TGA |
| | (SEQ ID NO: 361) |
| tnsB | ATGAACAGCAAGAGCCTGGGCCTGTTCGACGACGA |
| | GTTTCAGCACCCCATTCCTCAGGTGGAAGCCCCTA |
| | AGAGCACCAAGGCCGAGAAGGACCTGAGCGCCTAT |
| | CCTCAAGAGATCCAGCAGACCACCTACGCCAGACT |
| | GAAGTACATCCGGTGGCTGAAAGAGCGGATCGTCG |
| | GCGGATGGACCGAGAAGAATCTGGCCCCTCTGATC |
| | AACGAGATGCCCAAGGTGGAAGGCGCCGACAAGCC |
| | CAATTGGAGAACAGCCGCCAGATGGTTCAAGAGCT |
| | ACAGCGAGAGCGACGAGAGCATCTTCGCTCTGATC |
| | CCCAAGCACCAGAAGAAGGGCAAGAGAACCCAGCG |
| | GACCGACACCGACAAGTTCTTCGAGAAGGCCCTGG |
| | AACGGTTCCTGGTCAAAGAGAGGCCTAGCGTCAGC |
| | AGCGCCTACCAGTACTACAAGGACCTGGTGGTCAT |
| | CGAGAACGAGAAAGTGATCGGCGAGGACCTGCGGC |
| | CTCTGACCTACAAGGCCTTCAAGAACCGGATCGAC |
| | AAGCTGCCCCACTACGAGGTGCTGAGAGCCAGATA |
| | CGGAAAGCGGATTGCCGACCTGGCCTACAACAAAG |
| | TGGAAAGCCACAAGCGGCCCACCAGAGTGCTGGAA |
| | CGAGTGGAAGTGGATCACACCCCTCTGGACCTGAT |
| | CCTGCTGGACGACGAGCTGCAGATTCCTCTGGGCA |
| | GACCCACACTGACCATCCTGATCGACGTGTACAGC |
| | CACTGCATCGTGGGCTTCTACCTGGGCTTCAACGA |
| | GCCCAGCTACGACGCCATTAGACGGGCCATGCTGA |
| | ACGCCATGAAGCCCAAGAACTGGATCAAAGAGCAG |
| | TACCCCGACATCACCCACGACTGGCCTTGCTGCGG |
| | AAAGATCGAGACACTGGTGGTGGACAACGGCGTGG |
| | AATTCTGGTCCAACAGCTTCGAGAGCGCCTGCGCT |
| | CAGATCGGCATCAGCCTGCAGTATAACCCCGTGGG |
| | CAAGCCCTGGCTGAAGCCCTTCGTGGAAAGAATCT |
| | TCGGCGTGATCAACACCCAGCTGCTGGACCCTATT |
| | CCTGGCAAGACCTTCAGCAACATGATGAAGAAAGA |
| | GGGCTACGACCCCAACAAGGACGCCATCATGAGAT |
| | TCAGCGCCTTCATGGAAGTGTTCCACCACTGGATC |
| | ATCGACGTCTACCACCAAGAGGCCGACAGCCGGTT |
| | CAGCTACATCCCTGCTCTGGAATGGGACCGGGGCT |
| | ACAATCAACTGCCTCCTGCTCCTCTGAGCAGCGAC |
| | GACATCCAGAGACTGGAAATCGTGCTGGGCATCAG |
| | CACCTGGCGGCACATCAGAAAAGGCGGCATCCACT |
| | TCGAGAACCTGAGATACGACAGCAACGAGCTGGCC |
| | GACTACCGGAAGAGGTTTAGCCCTAAGGCCAGCGT |
| | GAAGCTGCTGCTGAAAGTGAACCCCGAGGATCTGA |
| | GCCGGGTGTACGCCTTTCTGCCTGAGCTGGACCAC |
| | TACATTGAGGTGCTGTGCATCGACCCCAATGGCTA |
| | CACAGCCGGACTGTCTCTGCACCAGCACAAAGTGA |
| | ATGTGCGGCTGCAGCGGGACTTCATCGGCAGCCAT |
| | ATGGATGTGGCCGCTCTGGCCAGGGCCAGAATGCT |
| | GATCCACGAGAAGATCCAGAGCGAGGTGGAACTGC |
| | TGGCCAACTCCACCAGAAAGCCCAAAGTGCGCGGA |
| | GGAAAGGCACTGGCCAAGTACCAGAATGTGGCCAG |
| | CGACAACCTGGTGTCCGTGAAGCCTTCTCCACCTA |
| | CCAAGAAACTGCCTAACAAGGTCGAGACAGAGGAA |
| | GCCCAGAACAAAGGCGACTGGGACGACTTCGTGTC |
| | CGACCTGGAAGGCTTCTGA |
| | (SEQ ID NO: 362) |
| tnsC | ATGCTGAGCGAGATCCAGACACAGCGGCTGAACGA |
| | GTTCATCGACGTGTTCATCGAGTACCCTCTGATGA |
| | AGACCATCCTGAACGACTTCGAGCGGCTGAGAGCC |
| | GGACAAAAACTGGCCGGCGAGAAGCAGTGTATGCT |
| | GCTGACAGGCGATACCGGCTGTGGCAAGAGCAGCG |
| | TGATCAACCACTACAAGAACAAGCACCCCGCCTGC |
| | CACATCGACGGTGTCTATCATCACCCCGTGCTGGT |
| | GTCTCGGATCCCCTCTAGACCTACACTGGAAAGCA |
| | CAATCGCCCAGCTGCTGTCCGATCTGGGACAAGTG |
| | GGAGCCGCCAAGCGGAAGCTGAAGAGAAACGACGC |
| | CAACCTGACCGACAGCCTGATCGCCAATCTGAAGT |
| | CCTGTGGCACCGAGCTGATCATCATCAACGAGTTC |
| | CAAGAGCTGGTGGAAAGCAACCAGGGCAAGAAGCG |
| | GAACGCAGATTGCCGAAGAACCCCAGTGGTCCAGC |
| | AGACTGATGATCCGCAGATTCATCCCCTACTTCAA |
| | GCTGTCCGAGGAAGATCGCCAACCGGCTGAAGTAC |
| | CTGAACGAGGAAGCCGGCATTCCCATCGTGCTTGT |
| | GGGCATGCCTTGGGCCGAACAGATTGCCGAAGAAC |
| | CCCAGTGGTCCAGCAGACTGATGATCCGCAGATTC |
| | ATCCCCTACTTCAAGCTGTCCGAGGACGTGACCCT |
| | GTTCGTGCGAGTGCTGATGGGACTTGCCGCCAGAA |
| | TGCCCTTCAGAGAGAAGCCCAGAATCCAGCAGCAG |
| | GACATCGTGTACGCCCTGTTCGCCGTGTCCAAGGG |
| | CTGCTTCAGAACCCTGAAGCACTTCCTGAATGAGG |
| | CCGTGAAGCAGGCCCTGATGTGTGGATCTGAGGCC |
| | CTGACAAAGCAGCACCTGTCTGCCGCCTTCGAGGT |
| | GTTCTATCCCGGCATCGAGGACCCTTTCAAGCTGA |
| | GCGTGGACGAGATCACAGCCTGCGAGGTGGAACAC |
| | TACAGCGTGTACCACACCGACAGCTCCAGCGACAA |
| | CGAGGCCCACAATCCTACCAGATTCACCGAGAGAG |
| | TGGCCATTTCTCAGCTGCTGAAGAGGAACTGA |
| | (SEQ ID NO: 363) |
| tnsD | ATGCACTTCATCGTGCAGACCAAGCCTTTCAAGGA |
| | CGAGACACTGGAAAGCTACCTGCTGCGGCTGACCA |
| | GAGACAACGCCTACGCCGATTATCACGAGCTGGCC |
| | GACATCATCTGGCAGAGCCTGGTGGAATGCGACCA |
| | CGAACTGGAAGGCGCTTTCCCTCTGGACCTGAAAA |
| | CCGCCAATCTGTACCACGCCAGCCAGAGCAGCAGA |
| | TTCAGAGTGCGGGCCTTTAAGCTGGTGGCCCAATG |
| | GGCTGCTCTTGCCCCACTGGAACTGATCAGACTGA |
| | GCTGGCTGCGGAGCAACACCCAGTTTGGACATCTG |
| | ACAGCCCTGATCCGGGACCAGCTGCTGATCCCTAG |
| | AATGCTGCTGCGCGAGAACTACGTGCCCATCTGCA |
| | GCGAGTGCCTGAAAGAAGAGAGCTACTTCCCCTAC |
| | TACTGGCACCTGAAGCCTTACAAGGCCTGCCACAA |
| | GCACAAGGTCCAGCTGCAGTCTCACTGTGCCGAGT |
| | GTGGCGAGCTGATCGACTACAGAGCCAGCGAGCAG |
| | TTCAGCCAGTGTAGCTGTGGGGCCAAGCTGAAAAC |
| | AATGGCCCCTGCCTCTGAGGCCGATATCGCCGTTT |
| | CTGAAGGACTGTCTGGCGCCGATGCTCACCACTGG |
| | GTTGGAAAGCTGGCTTGGTTTGCCTACCAGTACGG |
| | CCACGATCAAGAGCACGCCAGCTTCAACGAGGCCT |
| | TCATCAGCTACTTCAAGCACTGGCCCGACAATTTC |
| | TTCGCCGAGCTGGACGAGAAGGTGTTCCGGGCCAG |
| | AGAGAAACAGCTGCGGCCCTTCAACCACACCAAGT |
| | TCGATAGCGTGTTCGGCGACGTGATCAAAGTGGGC |
| | AAAGTGGCCGCTCCTAACGTGCTGAGAAGCAACTT |
| | CGTGGTGGACAGCCTGCTGTCCTACTTCAGCGATC |
| | TGGTGGAAAAGAACCCCAAGCAGAAGCACCCCAAT |
| | ATCGCCGACCTGCTGCTGAACAGCCTGGACTTTGC |
| | TACCCTGCTGGGCACCACACTGGAACAGGTGTTCA |
| | GACTGTACCAAGAGGGCCAGCTGACCTGTTGCGAG |
| | CGGCTGAACAAGAACGAGCGCCTGCAGCCTGACAG |
| | ATGCGTGTTCTACCTGAGACAGGTGGTGGAACTGG |
| | CCCAGAGCCAGGGCAGATATGTGGGCGACTTCAAG |
| | AACCAGCTGATCACCCCTTGGTGA |
| | (SEQ ID NO: 364) |

[0107] 98326|0|GCA_001543505.1_ASM154350v1_genomic|JNTX01000001.1|444259|Vibrio (ID: 113)

TABLE 23

| Elements | Sequences |
|---|---|
| tnsA | ATGTACGTGCGGAACCTGAGAAAGCCCAGCGCCAC |
| | CAAGAACGTGTACAAGTTCGCCAGCAGCAAGAACC |
| | GGAACGTGATCCTGTGCGAGAGCAGCCTGGAACGG |
| | GATTGCTGTTACCACCTGGAATACTCCAAGGACGT |
| | GTTCAGCTTCCAGTCTCAGCCCGAGGGCTTCTACT |
| | ACAGCAGCGGCAACAAGCGGTGCCCCTACACACCC |
| | GATTTTCTCGTGCGGAATCAGGACGGCAGCGAGTA |
| | CTACCTGGAAGTGAAGCCTCTGGCCAAGACCTTCA |
| | GCGAGGACTTCAAGCACAGCTTCGCCCTGAAGAGA |
| | ATCGCCGCTCAGCACCAGGGAAAGCCACTGGTGCT |
| | GGTCACCGACAAGCAGATCAGAAACGGCGTGTACC |
| | TGGAAAACCTGAACCTGATCCACAGATACGGCGGC |
| | CTGGTGGACTTTAGCCTGAGCAGCACACGGATCGT |
| | GGAAGAACTGTCTGCCGCCGGACGGATGTGCATCA |
| | GAAGCCTGGCCGACAACCTGAAGCTGAGCATCGGA |
| | GAAGTGATCGCCGTGGTGTTCAGACTCGTTGGCCT |
| | GGGCAGAGTGAACGTGCCACTGGACTCTGCCATCA |
| | ACGAGATGAGCGTGATCAGCGTGAACTGA |
| | (SEQ ID NO: 365) |
| tnsB | ATGGTCATCCCCTTCGACGACGAGTTCGAGTTCAT |
| | CACCGACGACACCCAGGCCGAGTACGATAGCACAT |
| | CTGAGGCCAAGCTGGCCCGGAAGCAGTACCTGCCT |
| | CTGGATAGCGTGACCATCCACGAGAGAGGCCTGAG |
| | CAGCTTCAGCGAGGAACAGAAGAACAAGGCCCTGG |
| | AACGGTACAAGCTGATCTCCGCCGTGGCCAAAGAG |
| | ATCAGCGGAGGCTGGACCCCTAAGAACATCAACCC |
| | TCTGATCGACAAGTACAGCCCCAACCTGAGCATCA |
| | AGCGGCCCAGCTACAAGAGCGTGATCCGGTGGTAC |
| | AAGAGCTTCTGCGAGAACGACGGCAACATCGTGTG |
| | CCTGGTGGACCACAACCACAGCAAGGGCAACCGCA |
| | CCAAGCGGATTATCGACGATGAGGCCTTCTTCGTG |
| | GAAGCCACCGAGAGATTTCTGGACGCCAAGAGGCC |
| | CAACTACAGCCAGGCCTACCAGTTCTACTGCGACC |
| | GGATCGAGATCGAGAACAGCAACATCATCAGCGGC |
| | CAGATCAGCAAGGTGTCCTACCAGGCCTTCAAAGA |
| | GCGGCTGAAGAAGCTGCCTCCTTACGAGGTGGCCC |
| | TGAAGAGATTCGGCCCCAATTACGCCAACAAGCTG |
| | TTCAACTACTACCAGAGCAGCGTGCGGACCAGCCG |
| | GATCCTGGAAAGAGTGGAAATCGATCACACCCCTC |
| | TGGACCTGATCCTGCTGGACGACGATCTGCTGATC |
| | CCTCTGGGCAGAGCCTACCTGACACTGCTGGTGGA |
| | TGTGTTCAGCGGCTGCATCATCGGCTTCCACCTGG |
| | GCTTCAACCCTCCAAGCTATGTGTCTGTGGCCAAG |
| | GCCATCATCCACAGCGTGAAGTCCAAGGACTACGT |
| | GCACGACCTGAACATCGAGCTGACCAACGACTGGC |
| | TGTGCCACGGCAAGATGGAAACCCTGGTGGTGGAT |
| | AACGGCGCCGAGTTCTGGTCCAAGTCTCTGGATCA |
| | GGCCTGCATGGAAGCCGGCATCCACTACGAGTACT |
| | GCAAAGTGGGACAGCCCTGGGAGAAGCCTAGAGTG |
| | GAACGGAAGTTCCTGGAAATCATCCAGGGCATCGT |
| | CGGCTGGGTGCCCGGAAAGACCTTCTCCAACATTC |
| | TGGAAAAGGACCGCTACGACCCTCAGAAAGACGCC |
| | GTGATGCGGTTCAGCAGCTTTGTGGAAGAACTGCA |
| | CCGGTGGATCATCGACGTGCACAACGCCTCTCCAG |
| | ACAGCCGGAACACAAAGATCCCCAACTACCACTGG |
| | AAGAAGTCCGAGGAAGCCCTGCCTCCTGCCGCTCT |
| | GTCTGATAGAGATGAGAAGCAGTTCCGGATCATCA |
| | TGGGCGTGATCCACGAGGGCGTCGTGACCACAAAG |
| | GGCATCAAGTACAAGCACCTGATGTACGACAACGT |
| | GGCCCTCGAGCAGTACAGAAAGCAGTATCCCCAGA |
| | CCAAAGAGAGCCGGAAGAAAACCATCAAGATCGAC |
| | CCCGACGACCTGTCCAGCATCTTCGTGTACCTGGA |
| | AGAGATCGATGGCTACATCGAGGTGCCCTGCAAAT |
| | ACGATCCCCTGGGCTACACCAAGAACCTGAGCCTG |
| | TCTGAACACGTGCGGATCACCAAGATCCACCGCGA |
| | CTTCATCAAAGGCCAGGTGGACGCACTGAGCCTGG |
| | CCAAAGCTAGACAGGCCCTGCACGAGAGAATCAAG |
| | ACCGAGCAAGAGCACCTGTCTCTGATGAGCGTGGA |
| | AAGCAGAGCCAAGAAGGCCAAGCACGGAAAGAAGA |
| | TGGCTGCCCTGAGCGGCATCAGCAACGAGCAGCCT |
| | ATGAGCATCCAGAACGCCCTGGAAAACAAGAACAA |
| | ACCCCTGGACGACAACCTGGACGAGCCCACACCTG |
| | TGGACAACCTGAAGTCCCTGTGGAACAAGCGGAAG |
| | GCCATGAAGCGGAGCAAAGAGTGA |
| | (SEQ ID |
| | NO: 366) |
| tnsC | ATGAACCTGAGCGCCAAGCAAGAGATCGCCGTGGA |
| | TGAGCTGCTGACCCAGTACCACAACAGCTTCGTGA |
| | TCTACCCCGACGTGCAGCAGATCTTCGACGGCCTG |
| | GATTGGATCGTGCGGAGAAGCCAGTTCGGCAACTT |
| | CACCCCTAGCATGCTGATCACCGGTGGAACAGGCG |
| | CCGGAAAGACCAGCCTGATCAACCACTACGTGAAG |
| | TACCACTTCAACGACAACGAGGTCCTGATCACCAG |
| | AGTGCGGCCCAGCTTCATCGAGACACTGATCTGGG |
| | CTATCGACAAGCTGGGCATCCCCTACAACACCAGA |
| | AGCAAGCGGAGCGAGATCGGCCTGCAGGACTACTT |
| | CATCAACAGCGTGAAGAAGTCCAACCTGAAGCTGC |
| | TGGTCATCGAGGAAGCCCAAGAGCTGTTCGAGTGC |
| | GCTAGCCCCAAAGAGCGGCAGAAGATCCGGGACAG |
| | ACTGAAGATGATCAGCGACGAGTGCAGACTGCCCA |
| | TCGTGTTCATCGGCATCCCTACCGCCAAGCTGATC |
| | CTGGAAGATAGCCAGTGGGACAGACGGATCATGGT |
| | CAAGAGAGAGCTGCCCTACATCCGGATCACCAGCG |
| | AGTCTAGCCTGGACGTGTACATCGACCTGCTGGAA |
| | GAACTGGAAAAGCAGCTGCCTATCAGCGTGCAGCC |
| | CGACCTGAGCGAGATGGATATCGCCATGAGACTGC |
| | TGTCCGCCACCAAGGGAATGCTGGGCGCCATCAAA |
| | GAACTCGTGGGCTACGCTCTGGAACTGGCCCTGCT |
| | GTCTGGAAAGAGCGCCATCACCAACGACGAGTTCG |
| | CCCTGGGCTTCGAGAGAATCAACGGCCCCGATGTG |
| | ACAAACCCCTTCACCACCGAGCTGGAAAAACTGCT |
| | GGTGCCCCAAGTGATCGAGTACGAGGGCTTCATCA |
| | TCGACCCCGAGAACGGCGAGATCAAGTTCACCAAG |
| | CAGATTTTCAAGGACATCCCTCTGGCCGCTCTGCT |
| | GGGATAA |
| | (SEQ ID NO: 367) |
| tnsD | ATGGACATCCAGCTGTACCCCGACGAGAGCCTGGA |
| | AAGCTTCCTGCTGAGACTGAGCCAAGAGCAGGGCT |
| | ACGAGCGGTTCTCTCACTTCGCCGAGGACATTTGG |
| | TTCGACACCATGGAACAGCACGAGGCCATTGCCGG |
| | CGCTTTCCCTCTGGAACTGAACCGGATCAACATCT |
| | ATCACGCCCAGACCACCAGCCAGATGAGAGTGCGG |
| | GTGCTGATCCACCTGGAAAACCAGCTGAAGCTGAA |
| | CAACTTCGGCGCCCTGAGACTGGCCCTGTCTCACT |
| | CTAAAGCCCAGTTCAGCCCCGAGTACAAGGCCGTG |
| | CATAGACTGGGCAGCGACTACCCCTTTGTGTTCCT |
| | GGCCAAGCGGTTTACCCCTATCTGCCCTCTGTGCA |
| | TCAGCGAGGCCCCTTACATCAGACAGCAGTGGCAG |
| | TTCCTGAGCCAGCAGGCTTGTGAAAGACACGGCTG |
| | CAAGCTGGTGCACCTGTGTCCTGAGTGTCAGAGCC |
| | GGCTGGAATACCAGACAACCGAGAGCATCAGCCAG |
| | TGCGAGTGTGGCTTCGAGCTGAGAAACAGCCCCGT |
| | GGAAGATGCCCCTGTGGCTGTTCTGCTGGTGGCCA |
| | GATGGCTGAGCGGCAACGATTCTAAGCCTCTGGGA |
| | CTGCTGAAGGCCGAGATGACCCTGAGCGAGAGATA |
| | CGGCTTTCTGCTTTGGTACGTGAACCGCTACGGCG |
| | ACATCGAGAACATCAGCTTCGAGAGCTTCGTGGAA |
| | TACTGCAGCTGCTGGCCCAGAGTGCTGAAAGAGGA |
| | ACTGGACGAGCTGGTCAACAAGGCCGACCTGATCA |
| | GAATCAAGGACTGGAAGAAAACCTTCTTCAACGAG |
| | GTGTTCGGAGCCCTCCTGAAGGACTGCAGACAGCT |
| | GCCTTCTCGGCAGCTGGAAAGAAACAGCGTGCTGA |
| | CTCAGGTGCTGGCCTACTTCACCAAGCTGATGGCC |
| | ACACTGCCCAGCAGCAGCAAGGGCAATGTGGGAGA |
| | TGTGCTGCTGAGCCCACTGGAAGTGTCTACCCTGC |
| | TGAGCTGCACCACCGATGAGGTGTACCGGCTGTAC |
| | GAGTTCGGCGAGATCAAGGCCGCCATCAGACCCAG |
| | AATGCACACCAAGATCGCCAGCCACGAGAGCGCCT |
| | TCACACTGAGAAGCGTGATCGAGACAAAGCTGACC |
| | CGGATGTGCAGCGAGAACGATGGCCTGTCTGTGTA |
| | CCTGCCTGAGTGGTGA |
| | (SEQ ID NO: 368) |

[0108] 98597|16|GCA_001550135.1_ASM155013v1_genomic|LRTE01000024.1|519275|PseTdoalteromonas (ID: 114)

TABLE 24

| Elements | Sequences |
|---|---|
| tnsA | ATGATCATGATTCGGCGGAAGCTGAAGCACAGCAG |
| | AGTGAAGAACCTGTACAAGTTCGCCAGCCAGAAGA |
| | TCAACGCCACCTGTCTGGTGGAAAGCAGCCTGGAA |
| | TTCGACGCCTGCTTCCACTTCGAGTACAGCAGAGA |
| | GATCAAGACCTTCGAGGCCCAGCCTCTGGGCTTTG |
| | AGTACGAGTTCGAGGGCAGAATCTGCCGGTACACC |
| | CCTGACTTTCTGATCACCCACGACGAGAACTCCCA |
| | GAAGTTCATCGAGATCAAGCCCTACAGCAAGATCG |
| | CTAACCCCGAGTTCAGAGCCAGATTCGCCCAGAAG |
| | CAGCTGATCGCCAAAGAGCAGATCGGCATCGAGCT |
| | GATCCTGGTCACCGACAAGCAGATCTGTGTGTACC |
| | CCGCTCTGGACAACCTGAAGCTGCTGCACAGATAC |
| | AGCGGCTTCCAGAGCCTGACCGATCTGCAGCTGAG |
| | CATCATCCAGCTGCTGAGCCAGTGGCGCAAGCTGA |
| | CCATTCAGGATCTCGTGCGGACACTGAAGGCCAGC |
| | ATTGGAGAAGTGCTGGCCTCCGTGTACAGACTGCT |
| | GTCTCTGGGCAGCGTGAACAGCGACCTGAATACCG |
| | AGCTGACACTGGAAAGCGTGATCTGGGCCGACGAA |
| | GTGTGA |
| | (SEQ ID NO: 369) |
| tnsB | ATGAAGTTCGAGGACGAGTTCAGCTTCGAGGAAGC |
| | CCCTCAGAAGCTGGCCGAGACAGCCAAGCCTGAGG |
| | AACACAAGTACCAGGACCGCGACCTGGAAAGCCTG |
| | CCTAAAGAGGTGCAAGAGGCCACACTGGCCCGGCT |
| | GAAATACGTGAAGTGGCTGAAGCAGAGACTGATCG |
| | GCGGCTGGACCCAGAAAAACCTGGTTCCTCTGCTG |
| | GCCGAAATGCCCGAGTTTCAGGGCCAAGAGAAGCC |
| | CAAGTGGCGGACAGTTGCCGGATGGCACAGCGGCT |
| | ATATCAAGGCCGAAGAGGACATCCACGCTCTGATC |
| | CCCAAGTACCACCGGAAGGGCAACAGAAAGCCCAG |
| | AACCGACACCGACAAGTTCTTCGAGCTGGCCCTGA |
| | CCAGATACCTGACCAAAGAAATCCCCAACGTGGCC |
| | AGCGCTCACCGGTTCTACTGTGACCAGATCGTGCT |
| | GGAAAACGACAAGGTGCTGGGCGAGCCTCTGAAGC |
| | CCCTGACCTACAAGGCCTTCAAGAACCGGATCGAC |
| | AACCTGCCTCAGTACGAAGTGATGCTGGAAAGATA |
| | CGGCAAGCGGCTGGCCGACATCGAGTACAGCAAAG |
| | TGATGAGCCACAAGCGGCCCACCAGAGTGCTCGAG |
| | AGAGTGGAAATCGATCACACCCCTCTGGACCTGAT |
| | CCTGCTGGACGATGAGCTGGATGTGCCACTGGGCA |
| | GACCTACACTGACCCTGCTGATCGACGTGTACAGC |
| | CACTGCGTCGTGGGCTTCTACCTGGGCTTCCAGTC |
| | TCCTTGCTACGACGCTGTGCGGAGAGCCATCTCTC |
| | ACGCCATGAAGCCTAAGAGCTACCTCAAGAGCATC |
| | TACCCCGAGATCGTGAACGAGTGGCTGTGCTGCGG |
| | CAAGATCGAGACACTGGTGGTGGATAACGGCGCCG |
| | AGTTCTGGTGTCAGAGCCTGGAACTGGCCTGCGAG |
| | GAAGTGGGCATCAACATCAGCTACAACCCCGTGGG |
| | CAAGCCCTGGCTGAAACCCTTCGTGGAACAGTTCT |
| | TCAAGACCATCAACGAGATGATGCTGAGCAGCTTC |
| | CCCGGCAAGACCTTCAGCAACATGCTGGCCAGACA |
| | CGACTACAACCCTAAGAAGGACGCCATCCTGAGAT |
| | TCGGCACCTTCACCATGCTGTTCCACAAGTGGATC |
| | GTGGACGTGTACCACAAGACCCCTGACGCCAGATT |
| | CCGGTACATCCCCTACGAGGACTGGAACAAGGGCT |
| | TCGCTTTGCTGCCTCCTGCTCAGCTGACCGAGCAG |
| | GACATCGATAAGCTGGACGTGGTCATGTGCATGGC |
| | CAAAGAGAAAACCCTGCGGAAAGGCGGCATCAAGA |
| | ACCTGCACATCAACTACGACAGCGACGAGCTGAGC |
| | CTGTACAGAAAGCAGTACAGCAGCAAGAAGTCCAT |
| | CAAAGTCAAAGTGAAGATCAACCCCGACGACCTGA |
| | GCTACCTGTACGTGTACCTGGACGCCCTGGAACAC |
| | TACATCAAGGTGCCCAGCATCGACCCTGAGGGCTA |
| | CACAATGGGCCTGAGCCTGATCCGGCACAAGATCC |
| | ACCTGAAGTTTCACAAGGACTACATCCAGGGCAAA |
| | GTGGAACTGCTGGGCCTCGCCAAGGCCAGACAGTT |
| | CATCGACGAACGCGTGAAAGAAGAGGCCCGGCAGC |
| | TGAAGAATGTGGGCAGCAAGATCAAAGTGACCGGC |
| | ACCAAGGCCATTGCCAGAGTGCAGGGCATCGACAA |
| | CACCCAAGTGAAGTCTATCGCCAAGACACCCGAGA |
| | CAAAGCAGGCCGAACCTACACCAGCCGACACCAAG |
| | CCAAAAGAGGACGAAGGCAGCTGGGACGACTTCAT |
| | CAGCGATCTGGACGGCTACTGA |
| | (SEQ ID NO: 370) |
| tnsC | ATGCTGACCGACCAGCAGAAAGAGCGGCTGAACGA |
| | GTTCAGAAACGTGTTCATCGAGTACCCCATCATCA |
| | CCACCGTGTTCAACGACTTCGACCGGCTGAGACTC |
| | GGCAAAGGACTGGCCGGCGAGAAGCCTTGCATGCT |
| | GCTGAATGGCGATACCGGCACAGGCAAGACAGCCC |
| | TGATCAAGCAGTACAAAGAGAGACATCTGCCCCAG |
| | TTCATCAACGGCGTGGTCAATCACCCCGTGCTGGT |
| | GTCTAGAATCCCCAGCAATCCCACACTGGAAAGCA |
| | CCCTGGCCGAGCTGCTGAAGGATCTGGGACAAGTG |
| | GGCAGCACCGAGCGGAAGCTGAGAATGAATGGCAC |
| | CAGACTGACCAGCAGCCTGATTAAGTGCCTGAAAA |
| | CCTGCGGCACCGAGCTGATCATCATCGACGAGTTC |
| | CAAGAGCTGATCGAGCACAACCAGGGCAAGAAGCG |
| | GAGAGAGATCGCCAACCGGCTGAAGTACATCAACG |
| | ATGAGGCCGGCGTGTCCATCGTGCTCGTTGGAATG |
| | CCTTGGGCCGAGAAGATCGCCGATGAGCCTCAGTG |
| | GTCTAGCAGACTGCTTGTGCGGAGACAGCTGCCCT |
| | ACTTCAAGCTGAGCGAGAACCCCAAGCACTTCGTG |
| | CAGCTGATTATCGGCCTGGCCAACAGAATGCCCTT |
| | CACCGAGAAGCCCAACCTGAGCGAACAGGCCACAG |
| | TGTTCGCCCTGTTCAGCCTGAGCAAGGGCTGCTTC |
| | AGAACCCTGAAGTACTTTCTGGACGACGCCGTGCT |
| | GTACGCCCTGATCGACAATGCCAAGACACTGACAG |
| | CCCAGCACCTGGTCAAGGCCTTCGAGGTGCTGTTC |
| | CCCGACGTGTCCAACCTGTTTACCCTGCCTGTGTC |
| | CGAGATCACCGCCAGCGAGGTGGAAAGATACAGCC |
| | TGTACAAGCCCGAGAGCGACCAGGACGAGGACCCT |
| | TTTATCGCCACCAAGTTCACCGACAGGATGCCCAT |
| | CAGCCAGCTGCTCAAGAAGTGA |
| | (SEQ ID NO: 371) |
| tnsD | ATGCACTTCCTGGTGCAGACCAAGCCTTTTCCAGA |
| | CGAGGCCCTGGAAAGCTACCTGCTGAGACTGGCCC |
| | GGAACAACAGCTACCACGGCTATTCTGAGCTGGCC |
| | GACATCCTGTGGCAGTGGCTGGCTGAACAGGACCA |
| | CGAACTTGAAGGCGCCCTGCCTCTGGAACTGAACA |
| | AAGTGGACGTGTACCACGCCAGACAGGCCAGCAGC |
| | TTCAGAATCAGAGCCCTGAAACTGGTGGCCCAGCT |
| | GGCTGATGTGAACGCCGGCGATATTCTGGAACTCG |
| | CCTGCAGAAGAAGCAACTTCAAGTTTGGCAACCTG |
| | GCCGCCGTGTCCAGAAACGAGCTGACAATCCCACT |
| | GGAACTGCTGCGGACCGAGAACATCCCTGTGTGCA |
| | TCGAGTGTCTGAGCGAGAGCAGCTACATCCCCTTC |
| | TACTGGCACCTGAAGCCTTACAAGGCCTGCCACAA |
| | GCACAAGACCCAGCTGACCACACAGTGCGGCGAGT |
| | GCCACAACCTGATCGACTACAGAGCCTCTGAGGCC |
| | CTGCTGGAATGTGGCTGTAGCTGCAAGCTGACCTG |
| | CAGCGAGCAGCTGAACGACGCCGACTTCAAGATCG |
| | CCAGCGCTCTGGTGTCCAACAACAGCCAGAAGATT |
| | GCCGGCCTGATCAGTTGGTTCGCCAAAGTGAAGCA |
| | GCTGGACGTGGGCGACGCTGATTTCAACAGAGCCT |
| | TCGTGGACTACTTCAGCACCTGGCCTGATGGCTTT |
| | ACCGCCGAGCTGGATCTGCTGACCAACAACGCTCG |
| | GCTGAAACAGCTGAACCCTCTGAACAAGACAAAGC |
| | TGAACAGCGTGTACGCCGACCTGATCCGGGATGCT |
| | CAGAGAGCCGCCACCAGCAACAGAAAGAACATCGT |
| | GCTGGACGAGATCATCAACTACTTCGTGGAACTGG |
| | TGGACAGCAACCCCAAGAGCAAGCACCCCAACATT |
| | GCCGACCTGCTGCTGTGCACCTTTGACACAGCCGT |
| | GCTGCTGAACACCACCACCGAACAGGTGTACCGGC |
| | TGCACCAAGAGGGCTTTCTGAACTGCGCCTATCCT |
| | CAGAAGAAACACGAACAGCTGCGGGCCGACAGCCA |
| | CGTGTTCTATCTGAGACAGGTGTTCGAGCTGCAGC |
| | AGGCCTTTGCCGCTGAAAGACCCCAGACCAAGAAG |
| | CAGTTTATCGCCCCTTGGTGA |
| | (SEQ ID NO: 372) |

[0109] 98901|0|GCA_001558415.2_ASM155841v2_genomic|CP014034.2|1671895|Vibri o (ID: 115)

TABLE 25

| Elements | Sequences |
|---|---|
| tnsA | ATGAGCGTGCTGAGCAGCCCATCACCTTCTCCAAG |
| | TCCAAGTCCATCACCAAGTCCATCTCCATCTCCAA |
| | GCACCGCCGCTCTGATCGCCCTGGAATCTGCCTTT |
| | GTGACCCCTGCCAGAAACCTGACCAAGAGCCGGGG |
| | CAAGAACATCCACAGATACGTGTCCGCCAAGATGG |
| | GCAAGCGCGTGACCGTGGAAAGCTTCCTGGAATGC |
| | GCCGCCTGCTACCACTTCGACTTCGAGCCTTCTAT |
| | CGTGCGGTTCTGCAGCCAGCCTATCCGGTTCAGCT |
| | ACTGCCTGAACGGCAAGACCCATACCTACGTGCCC |
| | GACTTCCTGGTGCAGTTCGATACCGGCGAGTTCAA |
| | GCTGTACGAAGTGAAGTCCGACATGGAAAGCAGCA |
| | AAGAGGAATTCCAGTGCGAGTGGGAAGCCAAGGTG |
| | CAGGGCGCCTTTGAACTGGGACTCGAGCTGGAACT |
| | GGTCACCGAGGAAGAGATCCTGGACGAAGTGATCT |
| | TCAGCAACCTGAAGCTGCTGCACCGCTACGCCAGC |
| | AGAGACAACCTGAACCACTTCCACCAGACACTGCT |
| | GGCCACCTTCAAGCTGAATGGCACCCAGACAGCCA |
| | AGTCTCTGGGACACCACCTGGGCCTGAATGGCCGG |
| | AAGATCCTGCCTTTCCTGTGCGACCTGCTGAGCCG |
| | GAATCTGCTGCAGACAAGCCTGGAAACCCCTCTGT |
| | CTCTGGAAAGCGAGTTCGAGCTTGTGTGCCACGCC |
| | TGA |
| | (SEQ ID NO: 373) |
| tnsB | ATGCCCAAGAACAGCTTCAGCAGCTTCCACAGAAA |
| | GAGCGCCTTCCAGCAGGACAAGCTGGAAAGCAACG |
| | ACAGAGTGGTGGTGGACATCAACGACGTGGACGAG |
| | GCCACCTACCAGGACATCAGCGCCTTTCCAGACAA |
| | CCTGGCCACACAGATCACCTTCCGGCTGAGCATCC |
| | TGAGATACCTGGCCAGCAAGTGCGAGCAGATCATC |
| | CCCAAGACCATCGAGCCTCACAGAGTGGCCCTGCA |
| | GAGACTGCACGACAGAAACATCCCCAGCAGCATCA |
| | GCATCTACCGGTGGTGGCTGGTGTTCAGAGCCAGC |
| | GACTGTAACCCTGCCTCTCTGGCCCCTAAGAACAA |
| | GGACAAGGGCAACAGCAAAGTGAAGGTGCCCATCT |
| | TCGTGGACGCTCTGCTGGAACAGGCCGTGGAAAGA |
| | GTGATCAGCGGCCGGAAAGTGCGCATCAGATCCGC |
| | CTATAAGAGAGTGCGGCGGAAGCTGAGACAGCACA |
| | ACCTGAACAACGGCACCGAGTACAAGTACCCCACC |
| | TACGAGAGCCTGCGCAAGAGAGTGAAGAAGAAAAC |
| | CCCTTTCGAGCTGCTGGCCGCCAAGAAAGGCGAGA |
| | GAGTGGCCAAGCGCGAGTTCAGAAGAATGGGCAAG |
| | AAGATCCTGACCAGCTACGTGCTGGAACGCGTGGA |
| | AATCGACCACACCGTGGTGGATCTGTTCGCCGTGC |
| | ACGAGGAACACAGAGTGCCTCTTGGTAGACCCTGG |
| | CTGACCCAGCTGGTGGACTGTTACAGCAAGACCGT |
| | GATCGGCTTCTACCTGGGCTTCGAGCCTCCTAGCT |
| | ACGTGTCAGTGTCACTGGCCCTGAAGAACGCCATC |
| | CTGAGGAAGGACGATCTGCTGAGCAGCTTCGACTC |
| | CGTGCAGAACGAGTGGCTGTGCTACGGCATCCCTG |
| | ATCTGCTGGTCACCGACAACGGCAAAGAGTTCCTG |
| | AGCAAGGCCTTCGACAAGGCCTGCGAGTCCCTGCT |
| | GATCAACGTGCACCAGAACAGAGTGGAAACCCCTG |
| | ACAACAAGCCCCACGTGGAACGGAACTACGGCACC |
| | ATCAATACCAGCCTGCTGGACGACCTGCCTGGCAA |
| | AGCCTTTAGCCAGTATCTGCAGCGCGAGGGCTACG |
| | ACTCTGTGGGAGAAGCTACCCTGACACTGGACGAG |
| | ATCAAAGAGATCTACCTGATCTGGCTCGTGGACAT |
| | CTACCACAAGAACTCCAACCAGCGGGGCACCAACT |
| | GTCCCAATGTGGCTTGGAAGAGGGGCTGCCAAGAG |
| | TGGGAGCCTGAAGAGTTTACCGGCAGCAAGGATGA |
| | GCTGGACTTCAAGTTCGCCATCGTGGACCACAAGC |
| | AGCTGACAAAGGCTGGCGTGACCGTGTACAAAGAA |
| | CTGGTGTACAGCAGCGAGAGGCTGGCCGAGTACAG |
| | AGGCAAAAAGGGCAACCACAAGGTGCAGCTGAAGT |
| | ACAACCCCGAGTGCATGGCCGTGATCTGGGTGCTC |
| | GACGAGGACCTGAACGAGTACTTCACCGTGAATGC |
| | CATCGACTACGTGTACGCCAGCAGGGTGTCACTGT |
| | GGCAGCACAAGTACAACATGAAGTACCAGGCCGAG |
| | CTGAACAGCGCCGAGTACGATGAGGACAAAGAGAT |
| | TGACGCCGAGATCAAGATCGAGGAAATCGCCGACC |
| | GGTCCATCGTCAAGACAAAGAAGATTCGGGCCAGA |
| | AGAAGAGGCGCCAGACACCAAGAGAATAGCGCCAG |
| | AGCCAAGAGCATCAGCGACGCCAAACCTGTGCCTA |
| | GCCAGAAGCACGAGGACGAGATTGTGGTGGTCGAC |
| | AACGAGGACTGGGACATCGATTATGTGTGA |
| | (SEQ ID NO: 374) |
| tnsC | ATGAACGAGACAAGAGAGGCCCGGATCAGCAAGGC |
| | CAAGAGGGCCTTTGTGTCTACCCCTAGCGTGACCA |
| | AGATCCTGTGCTACATGGACCGGTGCAGGGACCTG |
| | AGCGATTTCGAGTCTGAGCCTACCTGCATGATGGT |
| | GTACGGCGCTTCTGGCGTGGGCAAGACCACCATCA |
| | TCCGGAAGTACCTGAGCCAGAACAAGCGGGACTCT |
| | GAAGTCGGCGGCGACATCATTCCTGTGCTGCACAT |
| | CGAGCTGCCCGACAACGCCAAACCTGTTGACGCCG |
| | CTAGAGAACTGCTGGTGGAAATGGGCGATCCCCTG |
| | GCTCTGTACGAGACAGACCTGGCCAGACTGACCAA |
| | GAAGCTGATCGATCTGATCCCTCTCGTGGGCGTGA |
| | AGCTGATTATCATCGACGAGTTCCAGCACCTGGTG |
| | GAAGAACGGTCCAACCGGGTGCTGACCCAAGTCGG |
| | CAATTGGCTGAAGATGATCCTGAACAAGACCAAGT |
| | GTCCCATCGTGCTGTTCGGCATGCCCTACAGCAAA |
| | GTGGTGCTGCAGGCCAACTCTCAGCTGCACGGCAG |
| | ATTCAGCATCCAGTTCGAGCTGCGGCCCTTCAGCT |
| | ACCAAGGCGGAAATGGCGTGTTCAAGACCTTCCTG |
| | GAATACCTGGACAAGGCCCTGCCTTTCGAGAAGCA |
| | GGCCGGACTGGCCAATGAGAGCCTGCAGAAGAAGC |
| | TGTACGCCTTCAGCCAGGGCAACATGCGGAGCCTG |
| | AGAAACCTGATCTACCAGGCCAGCATCGAGGCCAT |
| | CGACAATCAGCACGCCAGCATCACCGAAGAGGACT |
| | TCGTGTTCGCCAGCAAGCTGACCAGCGGCGACAAG |
| | CCTATCAGCTGGAAGAACCCCTTCGACGAGGGCGT |
| | GAAAGTGACCGAGGATATGCTGCGGCCTCCTCCAA |
| | AGGATATCGGCTGGGAAGATTACCTGCGGAACACC |
| | ACACACAAGATCCGGAACAGCGGCGTGAAGAACAA |
| | CTTCTTCGACTGA |
| | (SEQ ID NO: 375) |
| tnsD | ATGCTGCTGCAGAGGCCTAAACCTCAGGCCGACGA |
| | GAGCCTGGAAAGCTACCTGATCAGAGTGGCCAACA |
| | ACAACGGCTACGAGAATATCAACCGGTTCCTGGTG |
| | GCCCTGAAGCACTACCTGTGCCACATCGACAGCAA |
| | GCGGTTCACCACCTTTCCAACCGACATCCGGCAGA |
| | TCAACCCCAGCAGCAGCCAGAGATCTAGCGCTGCC |
| | AGATCTCACGCCCTGCAGTACATCAGCCAGCTGAC |
| | CTTTACCGAGACAGCCGACCTGCTGAGACTGGCTA |
| | TCAGCAGAAGCCCTCTGAAGTTCAGCCCCAGCACC |
| | ACCTCTGTGATTAGAGCCGGCGAGATCCTGCCTAA |
| | GAGCCTGATCCGGACCAAGCACATCCCCTGCTGTA |
| | GCAGCTGTCTGATCGAGCAGGGCTACGCCAATTAC |
| | CTGTGGCACTTCGAGGGCTACGACTGCTGCCACAT |
| | CCACCAGAAGCTGCTGACCTTCAGATGCGAGTGCG |
| | GCGAGCCCTACGACTACAGAATCAATGGCCTGAGC |
| | CTGCAGTGCAGCTCCTGCGGCACAACAATCACCCA |
| | GAGCAAGAACGAGCCCGAGATCGACTCCCTGGAAA |
| | TCTCTCTGTGGCTGGCCGGCGAAACCATCAAGTGG |
| | CTGCCTGAACTGCCCGCCAGCTACAGATGGGGAAC |
| | AATCCATTGGTGGATGCGGAACCAGAACACCGAGG |
| | TGCTGGAAACCTGCAGCTTCTCCACCTTTTGGAGA |
| | CAGTGGCCCGAGAGCTTCCACAACCTGATTGAGCA |
| | GACCCTGAGCCACAATCAAGAGTACAGTCTGCAGG |
| | CCCCTCAAGAGTGGCGGCTGAAGGATCTGATTGGC |
| | GAGCTGCTGTTCGGCGCCATCAACCTGCCTCGGAG |
| | AAATCTGCAGTATAACCTGATCCTGCGCGAGCTGT |
| | TCTACTACCTGGAATCCCACCTGTGGGAGAACAAC |
| | GGCCTGATCGCCAACCTGAAGCTGAACGCCCTTGA |
| | AGCCGCTCTGGTGCTGAACTGCGATATCGAGCAGC |
| | TGGCCTCCATGGTGGAACAGGGACTGCTGGTGGCC |
| | ATGCGGCATCAGAAACACGATGAGCCCCTGAGCTA |
| | CACAAACTACCTGTTTCACTTCGGCGACATCTTTT |
| | GCCTGTGGCTCGCCGAGTTCCAGACCGACGAGTTC |
| | AACCGGTCCTTCTACACCAGCCGGTGGTGA |
| | (SEQ ID NO: 376) |

[0110] 100329|0|GCA_001593245.1_ASM159324v1_genomic|CP012504.1|4923009|Aer omonas (ID: 116)

TABLE 26

| Elements | Sequences |
|---|---|
| tnsA | ATGTACAGACGGCACCTGAAGCACAGCAGAGTGAA |
| | GAACCTGTTCAAGTTCGTGTCCGCCAAGATGAATA |
| | CCGTGTTCACCGTGGAAAGCGCCCTGGAATTCGAT |
| | ACCTGCTTCCACCTGGAATACTCCCCAAGCGTGAA |
| | GTTCTACGAGGCCCAGCCTGAGGGCTTCTACTACG |
| | AGTTTGCCGGCAGACAGTGCCCCTACACACCCGAC |
| | TTTAGACTGGTGGACCAGAACGACAGCGTGTCCTT |
| | CCTGGAAATCAAGCCCAGCAACAAGGTGGCCGAGC |
| | CTGACTTCCTGCACAGATTCCCTCTGAAGCAGCAG |
| | CGGGCCATCGAGCTGTCTAGCCCTCTGAAACTGGT |
| | CACCGAGAAGCAGATCAGAATCGACCCCATCCTGG |
| | GCAACCTGAAGCTGCTGCATAGATACAGCGGCTTC |
| | CAGAGCTTCACCCCTCTGCACATGCAGCTGCTGGG |
| | ACTCGTGCAGAAGCTGGGCAGAGTCTCTCTGCTGA |
| | GACTGAGCGACTCCATCGACGCCCCTCCAGAAGAA |
| | GTGCTGGCCTCTGCTCTGAGCCTGATCGCCAGAGG |
| | CATCATGCAGAGCGACCTGACCGTGCAAGAGATCG |
| | GCATCAGCACACTCGTGTGGGCCTCTGGCCACTCT |
| | GGAATCGATCACGGATGA |
| | (SEQ ID NO: 377) |
| tnsB | ATGGACGAGCACAACGGCCTGTTCGAGGACGAGTT |
| | CGTGATCCCTCAGCCTAGCGCCAGCACAAGCCCTA |
| | TCGATGCCATTCAGGCTGTGGTGCCTGCCACCGTG |
| | GATAGCTTTCCCGATGCTCTGAAGGTGGAAGCCCT |
| | GCACAGACGGGACTACATCCTGTGGGTCGAGAAGA |
| | ATCTGGCTGGCGGCTGGACCGAAAAGAACCTGGCT |
| | CCTCTGCTGGCCGATGCTGCTCTGGTTCTGCCTCC |
| | TCCTATTCCTAACTGGCGGACCCTTGCCAGATGGC |
| | GGAAGATCTACATCCAGCACGGCAGAACCCTGGTG |
| | TCTCTGATCCCTAAGCACCAGGCCAAGGGCAACAG |
| | CAGAAGCAGACTGCCTCCAAGCGACGAGCTGTTCT |
| | TCGAGCAAGCCGTGCACCGGTATCTCGTGGGAGAG |
| | CAGCCTTCTATCGCCAGCGCCTTTCAGCTGTACTC |
| | CGACAGCATCCTGATCGCCAATCTGGGCGTCGTGG |
| | AAAACAGCATCAAGACCATCAGCTACATGGCCTTC |
| | TACAACCGCGTGAAGAAGCTGCCCGCCTACCAAGT |
| | GATGAAGTCCCGGAAGGGCAGCTATATCGCCAACG |
| | TGGAATTCAAGGCCATCGGCAGCCACAAGCCACCT |
| | AGCCGGATCATGGAAAGAGTGGAAATCGATCACAC |
| | CCCTCTGGACCTGCTGCTGCTGGACGATGATCTGC |
| | TGGTCCCTCTGGGCAGACCTAGCCTGACACTGCTG |
| | ATCGATGCCTACAGCCACTGCGTCGTGGGCTTCAA |
| | CCTGAACTTCAACCAGCCTAGCTACGAGAGCGTGC |
| | GGAATGCCCTGCTGTCCAGCATCTCCAAGAAAGAC |
| | TACGTGAAGAACAAGTACCCCAGCATCGAGCACGA |
| | GTGGCCCTGTTACGGAAAGCCCGAAACACTGGTGG |
| | TGGACAACGGCGTGGAATTTTGGAGCGCCTCTCTG |
| | GCCCAGGCCTGTCTGGAACTGGGCATCAACATCCA |
| | GTACAACCCCGTGCGGAAGCCTTGGCTGAAGCCCA |
| | TGATCGAGCGGATGTTCGGCATCATCAACCGGAAG |
| | CTGCTGGAACCCATTCCTAGCAAGACCTTCTCCAA |
| | CATCCAAGAGAAGGGCGACTACGACCCTCAGAAAG |
| | ACGCCGTGATGCGGTTCAGCACCTTCCTGGAAATC |
| | TTCCACCACTGGGTCATCGACGTGTACCACTACGA |
| | GCCCGATAGCCGGTGCCGGTACATCCCTATCATCT |
| | CTTGGCAGCACGGCTCCAAGAACGTGCCACCAGCT |
| | CCTATCATCGGCGACGACCTGACCAAGCTGGAAGT |
| | GATCCTGAGCCTGTCTCTGCAGTGCACCCATAGAA |
| | GAGGCGGCATCCAGTGCCACCACCTGAGATACGAT |
| | TCCGATGAGCTGGCCTACTACCGGATGAACTACAG |
| | CGACAAGACCCGGGGCAAGAGAAAGGTGCTGGTCA |
| | AGCTGAACCCCAGAGACATCTCCTACGTGTACGTG |
| | TTCCTGGACGAGATCGGCAGCTACATCAGAGTGCC |
| | CTGCATCGACCCTATCGGCTACACAAAGGGACTGA |
| | GCCTGCAAGAGCACCAGATCAACGTGAAGCTGCAC |
| | CGCGATTTCATCAACGAGCAGATGGACGTGGTGTC |
| | CCTGAGCAAGGCCAGAACCTACCTGAACGACCGGA |
| | TCAAGAACGAACTGGTGGAAGTGCGGCACAACCTG |
| | CGGCAGAGAAATGTGAAGGGCGTGAACAAGATCGC |
| | CAAGTACCGGAACGTGGGCAGCCACGCCGAGACAT |
| | CTATTGTGCACGAGCTGAACATCAGCGCCACCAAC |
| | GACGTGATCAGCAAGATGGAAAACGCCTCTCAGCC |
| | CGAGCACTACGACGACTGGGATAAGTTCACCAGCG |
| | GCCTGGAACCTTACTGA |
| | (SEQ ID NO: 378) |
| tnsC | ATGGAACTGAGCTGCGACGACGCCAACAAGCTGCG |
| | GAGCTTCATCGAGTGCTACGTGGAAACCCCTCTGC |
| | TGCGGACCATCCAAGAGGACTTCGACCGGCTGCGG |
| | TTCAACAAGCAGTTTGCCGGCGAGCCTCAGTGCAT |
| | GCTGCTGACAGGCGATACAGGCACAGGCAAGTCTA |
| | GCCTGATCCGGTACTACGCCGCCAAGTATCCTGAG |
| | CAAGTGCGGCACGGCTTCATCCACAAGCCTCTGCT |
| | GGTGTCTCGGATCCCCAGCAGACCTACACTGGAAA |
| | GCACAATGGTGGAACTGCTGAAGGACCTGGGCCAG |
| | TTTGGCAGCAGCGAGAGAATCCACAAGAGCAGCGC |
| | CGAGTCTCTGACAGAGGCCCTGATCAAGTGCCTGA |
| | AGAGATGCGAGACAGAGCTGATCATCATCGACGAG |
| | TTCCAAGAGCTGATTGAGAACAAGACCCGCGAGAA |
| | GCGGAACCAGATCGCCAACCGGCTGAAGTACATCA |
| | GCGAGACAGCCAAGATTCCCATCGTGCTCGTGGGA |
| | ATGCCCTGGGCCATTAAGATCGCCGAGGAACCTCA |
| | GTGGTCCAGCAGACTGCTGATCAGACGGGCTATCC |
| | CCTACTTCAAGCTGAGCGACGACAGAGAGAACTTC |
| | ATCCGGCTGATCATGGGACTCGCCAACAGAATGCC |
| | CTTCGAGACACAAGTCCGGCTGGAAACAAAGCACA |
| | CCATCTACGCCCTGTTCGCCGCCTGTTACGGATCT |
| | CTGAGAGCCCTGAAACAGCTGCTGGACGAGTCTGT |
| | GAAACAGGCTCTGGCCGTGCACGCCGAGACACTGA |
| | AGCACGAACATATCGCCGTGGCCTATGGCGTGTTC |
| | TACCCCGACCAAGTGAACCCATTCCTGCAGCCTAT |
| | CGATGAGATCCAGGCCTGCGAAGTGAAGCAGTACA |
| | GCAGATACGAGATCGACGCCGTGGGCAAAGAGGAA |
| | ATCCTGTCTCCTCTGCAGTTCACCGACAAGCTGCC |
| | CATCAGCCAGCTGCTGAAGAAGCGGTAA |
| | (SEQ ID NO: 379) |
| tnsD | ATGCATCTGCTGATCAGACCCGATCCTAGCCTGGA |
| | CGAGAGCCTGGAAAGCTACTTCCTGCGGCTGAGCC |
| | AAGAGAACGGCTTCGAGCGGTTCTACCTGTTCAGC |
| | GGCGTGATCAAGGACTGGCTGCACACCACAGATCA |
| | TGCCGCCGCTGGCGCTTTTCCCCTGGAACTGTTTC |
| | GGCTGAACATCTTCCACGCCAGCAGATCCTCTGGC |
| | CTGAGAGTTAGAGCACTGCAGCTGGTGGACAGACT |
| | GACAGATGGCGCCCCTTTCAGACTGCTGCAACTGG |
| | CCCTGTCTCACAGCGCCATCAGCTTCGGCAATCAC |
| | CACAAGGCCGTGCACAGATCCGGCGTGGACATCCC |
| | TCTGTGCTTTATCCGGACCAGCAAGATCCCTTGCT |
| | GCCCCGACTGTCTGAGAGAAAGCGCTTACGTGCGG |
| | CAGTGCTGGCACTTCAAGCCTTACGTGGCCTGCCA |
| | CAGACATGGCGGCAGACTGATCGATAGCTGTCCTG |
| | CCTGTGGCGAGTCCCTGAATTACCTGGCCAGCGAG |
| | CTGATCAACTACTGCCAGTGCGGCTTCGACCTGAG |
| | AACCGCCTCTACAGTTCCCGCTCAGCCCGATGAGA |
| | TTCAGCTGTCTGCCCTGGCCTACGGCTGCAGCTTT |
| | GAGAGCAGTAATCCCCTGCTGGCCATCGGCTGTCT |
| | GAGCGCTAGATTTGGAGCCCTGCTGTGGTATCAGC |
| | AGAGATACCTGAGCGATCACGAGGCCGTGTGCGAC |
| | GATAGAGTGCTGGCCAAAGCCATCGGCCACTTTGC |
| | CGCTTGGCCTGATGCCTTTTGGGGAGAGCTGCAGC |
| | AGATGGTGGATGATGCCCTTGTGCGGCAGACCAAA |
| | GAGCTGAACCACACCGACTTCGTGGACGTGTTCGG |
| | CTCTGTGGTGGCCGATTGTCGGAGAATCCCCATGA |
| | GAAACACCGGCCAGAACTTCATCCTGAAGGACCTG |
| | ATCGTGTTCCTGACCGACCTGGTGGTGTCTCACCC |
| | TCAGTGCAGAGTGGCCAATGTGGGCGATCTGCTGC |
| | TGAGCGCACTGGATTCTGCCACACTGCTGAGCACC |
| | AGCATCGAGCAAGTTCGCAGACTGCAGCACGAGGG |
| | CTTTCTGCCTCTGGCCATTAGACCCGCCTCCAGAA |
| | ATACCGTGTCTCCTCACCGGGCCGTGTTCCACCTG |
| | AGACATGTGGTGGAACTGCGGCAGGCCAGAATGCA |
| | GAGCCACCACGATGACAGCAGCACCTATCTGCCTG |
| | CCTGGTGA |
| | (SEQ ID NO: 380) |

[0111] 102222|43|GCA_001639725.1_ASM163972v1_genomic|LTAW01000005.1|4216 76|Marinomonas (ID: 117)

TABLE 27

| Elements | Sequences |
|---|---|
| tnsA | ATGTACAACCGGAACCTGCGGAAGCCCTCTCCAAA |
| | CAAGAACATCTACAAGTTCGTGTCCCGGAAGAACC |
| | GGTCCACCGTGATGTGTGAAAGCGGCCTGGAATTC |
| | GACGCCTGCTTCCACCTCGAGTTCAGCCCTTCTAT |
| | CGCCAGCTTCGAGAGCCAGCCTACCGGCATTGAGT |
| | ACCCCGCCGATAACAAAGTGCGGCGGTACACCCCT |
| | GACTTCAAGATCGTGAAGGACACCGGCGAGATCGA |
| | GTACATCGAAGTGAAGCCCGAGCGGATCCACAGCA |
| | CCAAGAAGTTCAGGGACGAGTTCGAGCACAAGAGG |
| | GCCGCCTATTCTGCCCTGGGCTTCAAGCTGATCCT |
| | GGTGTCCGAGAAGCAGATCAGAAGCGACAAGCTGC |
| | TGAGCAACCTGAAGATCCTGCACCGGTACAGCAGC |
| | ACCAACCTGAGCGAGCTGCACAAGCTGGCCCTGAC |
| | ACACATCCAGAAGTTCAAGAGCCTGAGCATCCGGC |
| | AGCTGGCCATCAAGCTGGGCATCCTGATCTGCGAC |
| | TGTATCGCCGCTTGTGCCCTGCTGATCGGAATCGG |
| | AGCCATCAAGGCCGACCTGGAAAGCGACTTCCTGT |
| | GCGAGAACAGCCTGCTGAACGAGGCCTAA |
| | (SEQ ID NO: 381) |
| tnsB | ATGTTCGACGACGAGTTCGACGATAACCCTCTGAG |
| | AGAGGACGCCCAGAGCAGCAGCGATCAGCCTGACG |
| | AGATCAGCTTTCTGGACCCCGACCTGGACAGCTAC |
| | CCCAGCAATAGCAGAATCGAGGCCATTGCCAGATA |
| | CGAGCTGATCCTGTTCATCAGAGAGCGGCTGGCTG |
| | GCGGCTGGACCCAGAGAAATATCGACCCTCTGACC |
| | GACGAGTACTTCAGCGAGAACAGAGAGATCAACAA |
| | GCCCAACTGGCGGACCGTGACCAGATGGCACAAGA |
| | AGCTGCTGGAACAGGGCGACACCCCTAAGGCTCTG |
| | ATCGAGCGGCACCACAACAAGGGCAACAGAAACCG |
| | GAAGCTGGAACTGGAACACGAGCGGTACTTCGAGG |
| | CCGCCATCGACAGATTTCTGAAGGCCGAAAGACCC |
| | AGCGTGGCCAGCGCCTACAGATTCTACAAGGACCA |
| | GTGTCTGCTGCAGGGCCAGAACATCAACCCCATGA |
| | GCCAGAGAGCCTTCTACGACCGGATCGACAAGCTG |
| | AACTTCTACGAGGTGGCCGTGAAGAGATTCGGCAA |
| | GTACAAGGCCGACATTATGTACGGCTACAAGGGCA |
| | GCACCATCAGACCCGAGCGAGTGATGCAGAGAGTG |
| | GAAATCGATCACACCCCTCTGGACATCATCCTGCT |
| | GGACGACGAGACAAGCCAGCCTATCGGCAGACCCT |
| | ACCTGACACTGCTGAAGGACGTGTACAGCGGCTGT |
| | CTCGTGGGCTACCACCTGACCTTTAAGGCCCCTAG |
| | CTATGCCTCTGTGGCCAAGGCCATTTGCCACGCCA |
| | TCCAGCCTAAGAACCAGAGCTTTGAGGCCTGGGGC |
| | GTCGTGTGGCCTTGTTACGGAAAGATCGAGGTGCT |
| | GGTGGTGGACAACGGCGCCGAGTTTTGGAGCAAGA |
| | GCCTGGAACAGATGTGCTACGAGCTGGGCATCAAC |
| | GTGCAGTACAACCCCGTGCGGAAGCCCTGGCTGAA |
| | GCCCTTTATCGAGCGGAGCTTCCGGACCATCAATG |
| | ACCTGATCCTGATTGAGCTGCCCGGCAAGACCTTC |
| | CGGTCCATCGATACCAGGGACGAGTACAATGCCGT |
| | GGAACACGCCAGCATCAAGTTCAACCGGTTCATCC |
| | ACGGCTTCGAGAAGTGGATGGCCGAGGTGTACAAC |
| | TGCAGCGCCGATAGCAGAGGCCTGAAGGTGCCAAG |
| | CGTGAAGTGGCAAGAGGGCATCGAGACAATGCCTC |
| | CAGCCACACTGAACGACGATGAGATCAGCGAGCTG |
| | CCTAAGCTGGCCGGCCTGAAAGAGTCTAGAGCCAT |
| | CCAGTCTAGCGGCATCACCTACCACTACCTGAGAT |
| | ACGACTCTGACGCCCTGGCCGACTACAGAAAGCAG |
| | AGCCTGAGCAGCGACCGGTCCTACACCGTGACAAT |
| | CAAGGTGGACGTGGACGACCTGAGCCACATCTACG |
| | TGTACCTGCCTGAGCTGGAAAAGTACCTGACCGTG |
| | CCTTGCGTGGACCAGAGCTACACCAAGAACCTGAG |
| | CCTGGATCAGCACCTGGTCAACAGAAGCTTCGCCA |
| | AGGCTCACAACCGGCTGATCGGCAAGAGCGACACC |
| | GATCTGGCCATGGCTCGGCAAGAAATCCAAGAGAT |
| | CCTGGCCGATCAGGACGACAAGGCCAAGTCCAGCA |
| | CCAAGATCAAGACCAGCAAGAAGGCCGCTCAGTAC |
| | AAGGGCTACAGCAACGAGAGCGTGAAGAACAAGGT |
| | GGCCAATCCTAGCAGCGACGACGAAAAGAGCAACG |
| | CCGAGCACTCTGAGGTGTCCGAACTGGAAACCCTG |
| | TGGAACAGCCTGCGGAAGTGA |
| | (SEQ ID NO: 382) |
| tnsC | ATGGGACTGACCGATGCCGATAAGGCCAAGCTGAG |
| | AGAGTTCAAGGACTGCTTCTGCCCCTACACACCCG |
| | TGAACGCCATCCTGAACGACCTGGAAAGCCTGTAC |
| | CAGAGCAGCGAGATTGGCGGCGAGCAGCTGTCTAT |
| | GCTGCTGAGAGGCGATACCGGCACAGGCAAGAGCG |
| | CCATCATCAACCACTTCAGCCACGCCAAGAACGGC |
| | AGCCAGAGCGAGTCTATTCCCGTGCTGCTGTCCAG |
| | AGTGCCCAGCAAGCTGACCGTGGAAGATATGACCA |
| | GGCAGCTGCTGAGCGACCTGGGAGTGTTTGGCAGC |
| | ACAACCCACAGAGCCAGAAACTCCCAGTCTGACGC |
| | CCACCTGACCAACAGACTGCTGGACGCCCTGAAAG |
| | TGAAGCGGACCAAGATGATCATTATCAACGAGTTC |
| | CAAGAGCTGATCGAGTTCAAAGGCGCCAGAGACAG |
| | ACAGGCCATCGGCAACAGGCTGAAGCTGATCTCTG |
| | AAGAGGCCGCCGTGCCTATTGTGCTGGCTGGAATG |
| | CCTTGGATCGACGAGATCCTGAATGACAGCCAGTG |
| | GGCCAGCAGACTGGCCACCAGAACACACACCCTGC |
| | AGTACTTTAGCCTGAGCAAGCGGCCCCAAGAGTAC |
| | AGAGAGTTCCTGGAAGCTATCGAGCAGTACATCCC |
| | CTGCGATCTGGAAACCAGCCTGACCGACTTCGAGA |
| | TCTCTCTGGCCCTGTTTGCCGCCAGCTGTGGCGAA |
| | ATGAGACAGCTGAAGGCCATTCTGACCGAGACAAT |
| | CCAGCTGTGCCTGATCAACGGCAAGCCCCTGTCTA |
| | AGCAGGCCCTGAGCAACAGCTTCGCCAACCTGTAT |
| | AGCGGCGCTGACAACCCCTTCGAGACACCCAAAGA |
| | GAAGATCAAGATCCAAGAGGTCGAGATGCACAGCC |
| | AGTACATCAGAGGCGACAGCACCCACAGGGCCTCC |
| | ATCCAGCCTAGAAAGCTGAGCGAGATCATGACCCT |
| | GAGCCAGATCCTGTCCAAGAAGTGA |
| | (SEQ ID NO: 383) |
| tnsD | ATGAACTTCCTGCCGAATCCTATCGAGCTGTACGA |
| | GAACGAGACACTGGAAAGCGCCCTGCTGAGACTGT |
| | GCAGAGCCAACCACTTCGAGCACTACAACGACCTG |
| | AGCATCGAGATCAGAAGCTGGCTGGAAGAACATCA |
| | CCCCACCATTGCCGGCGCATTCCCTCTGGCTCTGG |
| | ATGCCGTGAATGTGTACCACAGCAAGCAGAGCAGC |
| | GCCAAGAGAGTGCAGTCTCTGCAGCTGCTGGAACA |
| | GCTCGTGGGCCTGCCTAAGTTTAGCCTGCTGGACG |
| | TGTCCTTCAAGCACACCAACGCCGTGGATAGCGGC |
| | CACTTTGCCGAAGTGCGGTACAAGCAGATCACAAT |
| | CCCCAAGAGCTTCGTGCGGGCCTGCAATGTGCCTG |
| | TGTGCATCGAGTGCCTGCGCGAGAGCAACTACGTC |
| | AGATTCGACTGGCACATCAGCAAAGTGACCTGCTG |
| | CGACAAGCACAAAGTGAAGCTGCTGACCAACTGTC |
| | CCAGCTGCAACACCACACTGAACTACATGATCAGC |
| | GAGGACCCCAGCAGATGCGTGTGTGGCTACTCTCT |
| | GTTTGGCGTGGACTCTAGCGAGGCCGGCATTGATG |
| | GATGGCGAAGATGGCCCAGCTTCGATCAGCAGGGA |
| | AAGCAGCCTTTCAGCGAGCAGCTGGCCATGCTGTT |
| | CTTTCTGGACCGGCACTTCCCCAAGCTGGGGCACG |
| | AAGAGTTCAACGACGATCTGAAGGGCCACATCGAG |
| | GGCCATCTGCAGAAGCTGATCGACCACAGCCTGCT |
| | GATTGCCACCGACAAGATCAACCGGCTGACCTTCA |
| | GCTACCTGACCAACAACTTCCTGAGCGACGTGGCC |
| | CAGATCAGCTGCCTGCCTGACTGCATCAAAGAATC |
| | TATCGCCAGCGTGGTCATCGAGCTGGCCCTGGAAA |
| | CACCCAGAAGCACAATCGCCAACCTGGGCGATAGC |
| | CTGGTGTCCATTAGAGAGGTGGCCCTGATCACCGG |
| | CAGCACCGTGGAAGATATTTTCAGACTGTACGAGT |
| | CCGGCATCCTGATGCTGGGCAAGAGAATCAGAGAT |
| | GAGGGCCGCCTGGAAAGCTTCAACCCCGCCTTCAG |
| | ACTGAGAGATGTGGCCGCCATCGTGCTGAGCTACA |
| | GCAGATATGGCTACAGCCAGAGCGCCTGGTGA |
| | (SEQ ID NO: 384) |

[0112] 103676|46|GCA_001675935.1_ASM167593v1_genomic|LZFV01000047.1|19454 0|Shewanella (ID: 118)

TABLE 28

| Elements | Sequences |
|---|---|
| tnsA | ATGTACATCCGGAACCTGCGGAAGCCCTCTCCAAA |
| | CAAGAACGTGTTCAAGTTCGCCAGCGCCAAAGTGA |
| | TCGAGACAGTGATGTGCGAGAGCACCCTGGAATTC |
| | GACGCCTGCTTCCACCACGAGTACAACGAGACAAT |
| | CGAGGCCTTCGGCTCTCAGCCCGAGGGCTTCTACT |
| | ACTACTTCGAGGGCAAGAGACTGCCCTACACACCC |
| | GATGCCATCCTGCGGTATATCGACGGCACCACCAA |
| | GTTCCACGAGTATAAGCCCTACAGCAAGACCTTCG |
| | ATCCCGTGTTCCGGGCCAAGTTCTTCGCCAAGAAA |
| | GACGCCGCCAGAGAGCTGGGCAGAGAACTGATCCT |
| | GGTCACCGACAAGCAGATCAGAGTGAACCCCATCC |
| | TGAACAACCTGAAGCTGCTGCACCGGTACAGCGGC |
| | ATCTACGGCGTGACCGATATCCAGAGAGAACTGCT |
| | GCAGCTGATCAGAAAGAGCGGCAAGCTCCAGCTGC |
| | ACGATATCGCCAGCGAGTACAAGTTCCCTATCGCC |
| | GAGACAAGAAGCTTCCTGTACAGCCTGATCAACAA |
| | GGGACTGATCAAGGCCGACCTGAACCAGGACGACC |
| | TGAGCTGCAATCCTAGCGTGTGGTGCAACGGCTGA |
| | (SEQ ID NO: 385) |
| tnsB | ATGATGGACTTCGAGGACGAGTTCACCGAGAGCAC |
| | CAGCGTGAAGAAGCCTGCCTCTCCTGCTCAGTACG |
| | TGAAGCTGGTGGATAGCGAGCTGGTCAAGCGCGAC |
| | CTGGATACCTTTCCTGACTTCCTGAAAGAGAAGGC |
| | CCTGGACAAGTACAAGCTGATCTCCGTGATCGAGC |
| | TGGAAAACAGCGGCGGCTGGACCCAGAAGAAGCTG |
| | GACCCTATCCTGGATAAGCTGTTCGAGGGCAACAC |
| | CGAGAAGAGGCCCAATTGGAGAACAGTCGTGCGGT |
| | GGCGGAAGTCCTACATCGAGAGCAATGGCGATCTG |
| | GCCAGCCTGGTGGACAAGAGCCACAAGAAGGGCAA |
| | CAGAAGCAAGCGGACCGAGGGCGAAGAGGTGTTCT |
| | TTGAGAGAGCCCTGCTGCGGTTCCTGGACGCCAAA |
| | AGACCTAAAGTGACCACCGCCTACCAGTACTACAA |
| | GGACGCCATCACCATCGAGAACGAGAACATCGTGG |
| | ACGGACAGATCCCCATCATCAGCTACAAGAGCTTC |
| | AACCAGCGGATCAAGAGCCTGCCACCTTATCCTAT |
| | CGCCGTGGCCAGACACGGCAAGTTCAAAGCCGATC |
| | AGTGGTTCGCCTACTGCAGCTCTCACATCCCTCCA |
| | ACCAGAATCCTGGAACGCGTGGAAATCGATCACAC |
| | CCCTCTGGACCTGATCCTGCTGGACGATGAACTGC |
| | TGCTGCCTCTGGGCAGACCCTACCTGACACTGATC |
| | GTGGATGTGTTCAGCAACTGCGTGCTGGGCTTCCA |
| | CCTGAGCTATAAGGCCCCTAGCTATGTGTCTGCCG |
| | CCAAGGCCATTGTGCACGCCATCAAGCCCAAGACA |
| | CTGAACGACGTGGGCATCGAGCTGCAGAACGACTG |
| | GCCTTGCTATGGCAAGTTCGAGACACTGGTGGTGG |
| | ATAACGGCGCCGAGTTCTGGTCTAAGAGCCTGGAC |
| | CACGCCTGTAAAGAGGCCGGCATCAACATCCAGTA |
| | CAACCCCGTGCGGAAGCCCTGGCTGAAGCCCTTCG |
| | TGGAAAGATTCTTCGGGATGATCAACCAGTACTTC |
| | CTGACCGAGATTCCCGGCAAGACCTTCAGCAACAT |
| | CCTGGAAAAAGAGGACTACAAGCCCGAGAAGGATG |
| | CCATCATGCGGTTCAGCGTGTTCGTGGAAGAGTTC |
| | CACAGATGGGTCGTCGACATCTACCACCAGGACAG |
| | CGACAGCCGGGACACACGGATCCCTATTAAGCAGT |
| | GGCAGCACGGCTTCGATATCTACCCTCCACTGCAG |
| | ATGACCGTGGAAGAAGAGAAGCGGTTCAACGTGCT |
| | GATGGGCATCACCGACGAGCGGACCCTGACCAGAA |
| | ACGGCTTCAAGTTTGAGGAACTGATGTACGACAGC |
| | ACAGCCCTGGCCGACTACCGGAAGCACTACCCTCA |
| | GACCAAGGATACCATCAAGAAGCTGATCAAGATCG |
| | ACCCCGACGACCTGAGCAGCATCCACGTGTACCTG |
| | GAAGAACTCGGAGGCTACCTGAAGGTGCCCTGCAC |
| | CGATACAACAGGCTACGTGTCCGGACTGAGCCTGC |
| | ACGAGCACAAAGTGATCAAGAAGATCAACCGGGAA |
| | ACCATCCGCGAGAGCAAGGACAATCTGGGCCTCGC |
| | CAAAGCCAGGATGGCCATTCATGCCAGAGTGCAGC |
| | AAGAGCAAGAGCTGTTCAACAAGTCCAAGACCAAG |
| | GCCAAGCTGCCCGAGCTGAAGAAGAAAGCCCAGCT |
| | GGCCGACATCAGCAACACAGGCCAGGGCACAATCC |
| | GGCTGGAAAAGTCTGATACCCTGAGCGCTATCCCC |
| | AACAAGCCTGAGCCTAACATCAGCGATATCCTGGA |
| | CAACTGGGACGACGACATCGAGGGCTTCGAGTGA |
| | (SEQ ID NO: 386) |
| tnsC | ATGAACACCCTGACAGCCCACCAGATGGAACAGCT |
| | GCGGAAGTTCAGCGACTGCTACGTGATGCACCCTC |
| | AGGTGTCCGTGATCTTCAACGACTTCGACGAGCTG |
| | CGGCTGAACCGGAACTTCCAGAGCGATCAGCAGTG |
| | TATGCTGCTGATTGGCGATACCGGCGTGGGCAAGA |
| | GCCACCTGATCAACAACTACAAGAAACGCGTGCTG |
| | GCCTCTCAGACCTACAGCAGAACCAGCATGCCTGT |
| | GCTGGTCACCAGGATCAGCAGCCACAAAGGCCTGG |
| | ACGCCACACTGAGACAGATGCTGACCGACCTGGAA |
| | AGCTTCGGCAGCCAGCAGAGAAAGGGCAAGAATTA |
| | CAAGATCGACCTCAAGACCCAGCTGGTCAAGAACC |
| | TCGTGCGGGCCAATGTGGAACTGCTGATTTTCAAC |
| | GAGTTTCAAGAGCTGATCGAGTTCAAGACCCCTAA |
| | AGAGCGGCAGACAATCGCCAACGAGCTGAAGTTCA |
| | TCAGCGAAGAGGCCAGAGTGCCCATCGTGCTCGTT |
| | GGAATGCCTTGGACAGAGCAGATCGCCGAGGAACC |
| | TCAGTGGTCCAGCAGACTGATCAGACGGCGGAGAC |
| | TGGAATACTTCAGCCTGCAGAAGGACAGCAAGTAC |
| | TACCGGCAGTACCTGATCGGCCTGGCCAAGCACAT |
| | GCCCTTCGATGAGCCTCCAAAGATCGAGGACAAGC |
| | ACATTGCCATTCCTCTGTTCGCCGCCTGCAGAGGC |
| | GAGAACAGAGCCCTGAATCATCTGCTGAGCGAGAC |
| | ACTGAAGCTGGTCATGGTCAACGGCGACAGAAGCC |
| | TGGACATCAGACATCTGGCCCACACCTACCGGAAG |
| | CTGTACGAGTCTCACGAGAGCGAGGCCACCTCTAT |
| | CTTCGTGAACCCCTTCCTGGAACCTCTGGACAAGG |
| | TGCTGATCTCCGAGGTGGTCAAGCCCAGCAGATAC |
| | AACCCCAACGCCATGACACCCGAGGACATGCTGAT |
| | CCCCAGAGAGTTTAGCGAGCCCTTCACACTGGCCC |
| | AGCTGCTGTCTAAGTGA |
| | (SEQ ID NO: 387) |
| tnsD | ATGGCCTTCCTGTTCAGCCCTAAAGTGCGGGCCTA |
| | CAGCGACGAGAGCCTGGAAAGCTATCTGCTGAGAG |
| | TGGTGGCCGAGAACTTCTTCGACAGCTACGAGCAG |
| | CTGAGCCTGGCCATCAGAGAGGAACTGCACGAGCT |
| | GGATTTTGAGGCCCACGGCGCCTTTCCAATCGAGC |
| | TGGAAAGACTGAACGTGTACCACGCCAAGCACAAC |
| | AGCCACTTCCGGATGAGAGCCTTCAGCCTGCTGGA |
| | AAGCCTGCTGAACCTGCCTCCTCACGAGCTGCAGA |
| | AACTGGCCCTGCTGCGGAGCAACAAGAGATTCGTT |
| | GGCGGCATGAGCGCCGTGCACAGAAACGGCGTTGA |
| | CATCCCTCTGAGCTTCATCAGATACGCCGACGACG |
| | GCATCGAGACAGTGCCTGTGTGTCCCCAGTGCCTG |
| | AAAGAGGAAGCCTACATCCGGCAAGTGTGGCACCT |
| | GAAGCCTGTGAACGTGTGTGCCAAGCACGAGTGCG |
| | AGCTGCTGCACCACTGTCCTGAGTGTCAGCAGCCC |
| | ATCAACCACATCGAGAACGAGAGCATCAATCACTG |
| | CGCCTGCGGCTTCGATTTCACCACCGCCTCTAGCA |
| | AGAAGGCCGACAATCAAGAGGTGGCCCTGGCCAGA |
| | TCTCTGTTTGAAGGCGACGCCCTGAGCAACAACCC |
| | TCTGCTGTTTATGGGCACCAGCGCCACACAGAGAT |
| | TCGCCGCTCTGCTGTGGTACAAGAAGCGGCACGCC |
| | AAGAACATCGAGTGCAAGCTGGACGAGAGCGTGAA |
| | CTACTTCGAGGCCTGGCCTAAGAACTTCTACCAAG |
| | AGCTGGATGAGTTCGTGGCTGGCGCCGAGCTGAAG |
| | CTGATCGACCTGTTCAACAGAACCAGCCTGTCCTT |
| | CATCTTCGGCGAGCTGATCCTGCAGAGCCAGTGTC |
| | TGCTGCCCGAGGATAAGACCCCTCACTTCATCTAC |
| | ATGGGCCTGATGGAATACCTGAGCAAGCTGGTGGA |
| | ATCTCACCCCAAGAGCAAGAAACCCAACGTGGCCG |
| | ACATGCTGGTGTCTGTGGCTGAAGCAGCTGTGCTG |
| | CTGAGCACCTCTCACGAACAGGTGTACCGGCTGTA |
| | CCAGGACGGCATCCTGACAAGCGCCATCCGGCAGA |
| | AGATCCGGACCAGAATCGATCCCCACATCGGCGTG |
| | TTCTACCTGCGGCAAGTGATCGAGTACAAGACCAG |
| | CTTCGGCAACGACAAGCAGGGCATGTACCTGTCCA |
| | CCTGGTGA |
| | (SEQ ID NO: 388) |

[0113] 115518|23|GCA_001957135.1_ASM195713v1_genomic|MPHK01000004.1|2582 47|Shewanella (ID: 119)

TABLE 29

| Elements | Sequences |
|---|---|
| tnsA | ATGTACATCCGGAACCTGCGGAAGCCCTCTCCAAA |
| | CAAGAACGTGTTCAAGTTCGCCAGCGCCAAGGTGT |
| | CCGAGACAATCATGTGCGAGAGCACCCTGGAATTC |
| | GACGCCTGCTTCCACCACGAGTACAACGAAACCAT |
| | CGAGACATTCGGCAGCCAGCCTAAGGGCTTCTACT |
| | ACTGCTTCGAGGGCAAGAGACTGCCCTACACACCC |
| | GATGCTCTGCTGCACTACATCGACGGCACCACCAA |
| | GTTCCACGAGTATAAGCCCTACAGCAAGACCTTCG |
| | ATCCCATCTTCCGGGCCAAGTTCGTGGCCAAGAAA |
| | GAAGCCGCTCAGGCCCTGGGAACAGAGCTGATCCT |
| | GGTCACCGACAAGCAGATCAGAGTGAACCCCATCC |
| | TGAACAACCTGAAGCTGCTGCACCGGTACAGCGGC |
| | ATCTACGGCGTGACCGATATCCAGAGAGAACTGCT |
| | GCAGCTGATCAGACACAGCGGCAAGATTCAGCTGG |
| | ACGACGTGGCCGATGAGTACGAGCTGTCTGTGGGC |
| | GAGACAAGAAGCTTCCTGTACAGCCTGATCAACAA |
| | GGGCCTGCTGGAAGCCGATCTGACCCAGGATGACC |
| | TGAGCTGCAACCCCTTCGTGTGGTGCAATGCCTGA |
| | (SEQ ID NO: 389) |
| tnsB | ATGATCGAGTTCAAGGACGAGTTCACCGAGAGCAC |
| | CAGCGTGAAGAAGCCCGATACACCCGGCCAGTACA |
| | TCAAGCTGGACGACGCCGAGATCCTGAAGCGCGAC |
| | CTGGATACCTTTCCTGACTTCCTGAAAGAGAAGGC |
| | CTTTGACAAGTACAAGCTGATCTCCTTCATCGAGC |
| | AAGAGAACAGCGGCGGCTGGACCCAGAAGAAGCTG |
| | GACCCTATCCTGGACAAGCTGTTCGAGGGCAACAG |
| | AGACAAGAGGCCCAATTGGAGAACCGTCGTGCGGT |
| | GGCGGAAGTCCTACATCGACAGCAATGGCGATCTG |
| | GCCAGCCTGGTGGTCAAGAGACACAAGATGGGGAA |
| | CCGCAAGAAAAGAGTGGAAGGCGACGAGGTGTTCT |
| | TCGAGAGAGCCCTGAGCAGATTCCTGGACGCCAAG |
| | CGGCCTAAAGTGACCACCGCCTACCAGTACTACAA |
| | GGACGCCATCACCATCGAGAACGAGACAATCGTGG |
| | ACGGCGAGATCCCCATCATCAGCTACACCGCCTTC |
| | AACCAGCGGATCAAGAGCCTGCCTCCTTATCCTAT |
| | CGCCGTGGCCAGACACGGCAAGTTCAAAGCCGATC |
| | AGTGGTTCGCCTACTGCAGCTCTCACATCCCTCCA |
| | ACCAGAATCCTGGAACGCGTGGAAATCGATCACAC |
| | CCCTCTGGACCTGATCCTGCTGGACGATGAACTGC |
| | AGCTGCCTCTGGGCAGACCCTACCTGACACTGATC |
| | GTGGATGTGTTCAGCAACTGCGTGCTGGGCTTCCA |
| | CCTGAGCTATAAGGCCCCTAGCTATGTGTCTGCCG |
| | CCAAGGCCATTGTGCACGCCATCAAGCCTAAGACA |
| | CTGGGCATCGTGGGAATCGAGCTGCAGAACGACTG |
| | GCCCTGCTATGGCAAGTTCGAGACACTGGTGGTGG |
| | ACAACGGCGCCGAGTTTTGGAGCAAGTCTCTGGAC |
| | CACGCCTGCAAAGAGGCCGGCATCAACATCCAGTA |
| | CAACCCCGTGCGGAAGCCCTGGCTGAAGCCCTTCG |
| | TGGAAAGATTCTTCGGGATGATCAACCAGTACTTC |
| | CTGACCGAGCTGCCCGGCAAGACCTTCAGCAACAT |
| | CCTGGAAAAAGAGGACTACAAGCCCGAGAAGGATG |
| | CCATCATGCGGTTCAGCGTGTTCGTGGAAGAGTTC |
| | CACAGATGGATCGTGGACATCTACCACCAGGACAG |
| | CGACAGCCGGGACACACGGATCCCTATTAAGCAGT |
| | GGCAGCACGGCTTCGACGTGTACCCTCCACTGCAG |
| | ATGAGCGTGGAAGATGAGAAGCGGTTCAACGTGCT |
| | GATGGGCATCACCGACGAGCGGACCCTGACCAGAA |
| | ACGGCTTCAAGTTTGAGGAACTGATGTACGACAGC |
| | ACAGCCCTGGCCGACTACCGGAAGCACTACCCTCA |
| | GACCAAGGATACCATCAAGAAGCTGATCAAGATCG |
| | ACCCCGACGACCTGTCCAACATCCACGTGTACCTG |
| | GAAGAACTGGAAGGCTACCTGAAGGTGCCCTGCAC |
| | CGATACAACAGGCTACGCCAATGGCCTGAGCCTGC |
| | ACGAGCACAAAGTGATCAAGAAGATCAACCGCGAG |
| | ATCATCAGAGAGAGCAAGGACAACCTGGGCCTCGC |
| | CAAAGCCAGGATGGCCATTCATGCCAGAGTGCAGC |
| | AAGAGCAAGAGCTGTTCAACGAGTCCAAGACCAAG |
| | GCCAAGATCAGCGCCGTGAAGAAACAGGCCCAGCT |
| | GGCCGACATCAGCAATACCGGACAGGGCACAATCC |
| | GGCTGGAAAACAGCGACACCCTGAGCGACATCACC |
| | AACAAGCCTGAGAGCAACATCAGCGACATTCTGGA |
| | CAACTGGGACGACAACATCGAGGGCTTCGAGTGA |
| | (SEQ ID NO: 390) |
| tnsC | ATGAACACCCTGACAGCCCACCAGATGGAACAGCT |
| | GGGCAGATTCAACGACTGCTTCGTGATGCACCCTC |
| | AGGCCAAAGTGATCTTCAACGATTTCGACGACCTG |
| | CGGCTGAACCGGAACTTCCAGAGCGATCAGCAGTG |
| | CATGCTGCTGACCGGCGATACAGGCGTGGGAAAGA |
| | GCCACCTGATCAACAACTACAAGAAACGCGTGCTG |
| | GCCTCTCAGACCTACAGCAGAACCAGCATGCCTGT |
| | GCTGGTCACCAGAATCAGCAGCCACAAAGGCCTGG |
| | ACGCCACACTGAGACAGATGCTGACCGACCTGGAA |
| | AGCTTCGGCAGCCAGCAGAGAAAGGGCCAGAATTA |
| | CAAGATCGACCTGAAAACCCAGCTGGTCAAGAACC |
| | TCGTGCGGGCCAATGTGGAACTGCTGATTTTCAAC |
| | GAGTTCCAAGAGCTGATCGAGTTCAAGACCCCTAA |
| | AGAGCGGCAGACAATCGCCAACGAGCTGAAGTTCA |
| | TCAGCGAAGAGGCCAGAGTGCCCATCGTGCTCGTT |
| | GGAATGCCTTGGACAGAGCAGATCGCCGAGGAACC |
| | TCAGTGGTCCAGCAGACTGATCCGGCGGAGAAAGC |
| | TGGAATACTTCAGCCTGCAGAAGGACAGCAAGTAC |
| | TACCGGCAGTACCTGATCGGCCTGGCCAAGCACAT |
| | GCCCTTCGATGAGCCTCCAAAGATCGAGGACAAGC |
| | ACATTGCCATTCCTCTGTTCGCCGCCTGCAGAGGC |
| | GAAAGCAGAGTGCTGAATCATCTGCTGAGCGAGAC |
| | ACTGAAGCTGGTCATGGTCAACGGCGACAGAAGCC |
| | TGGACATCAGACATCTGGCCCAGACCTACCGGAAG |
| | CTGTACGAGAGCCAAGAGTCTGAGGCCGCCAGCGT |
| | GTTCTTCAACCCCTTCCTGGAACCTCTGGACAAGG |
| | TGCTGATCTCCGAGGTGGTCAAGCCCAGCAGATAC |
| | AACCCCAACGCCATGACACCCGACGAGATGCTGAT |
| | CAAGAGAGAGTTCAGCGCCCCTAGCACACTGGCCC |
| | AGCTGCTGTCTAAATGA |
| | (SEQ ID NO: 391) |
| tnsD | ATGGCCTTCCTGTTCAGCCCTAAGGCCAGAAGCTT |
| | CAGCGACGAGAGCCTGGAAAGCTACCTGCTGAGAG |
| | TGGTGGCCGAGAACTTCTTCGACAGCTACCAGCAG |
| | CTGAGCCTGGCCATCAGAGAGGAACTGCACGAGCT |
| | GGATTTTGAGGCCCACGGCGCCTTTCCAGTGGAAC |
| | TGAAGAGACTGAACGTGTACCACGCCAAGCACAAC |
| | AGCCACTTCCGGATGAGAGCCCTGGGCCTGCTGGA |
| | ATCTCTGCTGGATCTGCCTCCTCACGAGCTGCAGA |
| | AACTGGCCCTGCTGCGGAGCAACAAGAGATTCGTT |
| | GGCGGCATGAGCGCCGTGCACAGAAACGGCGTTGA |
| | CATCCCTCTGAGCTTCATCAGATGCGCCGACGAGG |
| | ACGGCATCGAGTCCCTGCCTATTTGCCCTCAGTGC |
| | CTGAAAGAGGAACCCTACATCAGACAGGCCTGGCA |
| | CATCAAGCCCATCGAAGTGTGCGCCAAACACGAGT |
| | GCGAGCTGATCCACCACTGTCCTGATTGCCAGCAG |
| | CCTATCAGCTACATCGAGAACGAGAGCATCACCCA |
| | CTGCAGCTGCGGCTTCGAATTTGCCACAGCCAGCA |
| | GCGAGAAGGCCGATTCTCAGGCTGTGGTGCTGAGC |
| | AGAAGCCTGTTTGACGGCGACGCCCTGAGCAACAA |
| | CCCTCTGCTGTTTATGGGCACCAGCGTGACCCACA |
| | GATTCGCCGCTCTGCTGTGGTATCTGAAGCGGCAC |
| | GTGCAGAACATTGAGTGCAAGCTGGACGAGAGCGT |
| | GAACTACTTCGAGGCCTGGCCAGAGAATTTCTACC |
| | AAGAGCTGGATGAACTGCTGGCAGGCGCCGAGCTG |
| | AAGCTGATCGACCTGTTCAACAGAACCAGCCTGTC |
| | CTTCATCTTCGGCGAACTGATCCTGCAGAGCCAGT |
| | GCCTGCTGCCTGAGGATAAGACCCCTCACTTCATC |
| | GACATGGGACTGATGGAATACCTGGGCAAGCTGGT |
| | GGAATCTCACCCCAAGAGCAAGAAACCCAACGTGG |
| | CCGACATGCTGGTGTCCGTGACTGAAACAGCCGTG |
| | CTGCTGAGCACCAGCCACGAACAGGTGTACAGACT |
| | GTACCAGGACGGCGTGCTGACCGCCGGCTTCAAGC |
| | AGAAGATCCGGACCAGAATCGACCCTCACATCGGC |
| | GTGTTCTACCTGCGGCAAGTGATCGAGTACAAGAC |
| | CAGCTTCGGCAACGACAAGCAGGGCATGTACCTGA |
| | GCGCTTGGTGA |
| | (SEQ ID NO: 392) |

[0114] 123787|44|GCA_002156475.1_ASM215647v1_genomic|MVJE01000005.1|1421 59|Vibrio (ID: 120)

TABLE 30

| Elements | Sequences |
|---|---|
| tnsA | ATGAGCGCCCTGCCTTTCCTGTCTATCGCCACACT |
| | GCTGGAACTGGAAACCGCCTTCGATACCCCTGCCA |
| | GAAACCTGACCAAGAGCCGGGGCAAGAACATCCAC |
| | AGATACGTGTCCGCCAAGATGGGCAAGCGCGTGAC |
| | CGTGGAAAGCTTCCTGGAATGCGCCGCCTGCTACC |
| | ACTTCGACTTCGAGCCTTCTATCGTGCGGTTCTGC |
| | AGCCAGCCTATCCGGTTCAGCTACAGCCTGAACGG |
| | CAAGACCCATACCTACGTGCCCGACTTCCTGGTGC |
| | AGTTCGATACCGGCGAGTACCGGCTGTACGAAGTG |
| | AAGTCCGACAAAGAGAGCAGCAAAGAGGAATTCCA |
| | CTGCGAGTGGGAAGCCAAGGTGCAGGGCGCCTTTG |
| | AGATCGGCCTGGATCTGGAACTCGTGGTGGAAGAG |
| | GAAATCCTGGACGTCGTCATCTTCAACAACCTGAA |
| | GCTGCTGCACCGCTACGCCAGCCGGGACAATCTGA |
| | ACGACTTCCACCAGATCCTGCTGACCACACTGAAG |
| | CGGAATGGCACCCAGACAGCCAAGTCTCTGGGACA |
| | CCACCTGGGCCTGAATGGCAGAAAGATCCTGCCAT |
| | TTCTGTGCGACCTGCTGAGCCGGAATCTGCTGCAG |
| | ACAAGCCTGGAAACCCCTCTGTCTCTGGAAAGCGA |
| | GTTCGAGCTGGGCTGCTACGCTTGA |
| | (SEQ |
| | ID NO: 393) |
| tnsB | ATGCCCAAGAAGTCCTTCAGCAGCTTCCACAGAAA |
| | GAGCGCCCTGCAGCAAGAGAAGCTGGAACAGAACG |
| | ACAGAGTGGTGGACAGCAACGACGTGGACGAGGCC |
| | ACCTACCAGGACATCAGCGCCTTTCCAGAGAATAT |
| | CGCCAACCAGATCACCTTCCGGCTGAGCATCCTGA |
| | GATTTCTGGCCGGCAAGTGCGAGAAGATCACCCCT |
| | AAGACCATCGAGCCCTACAGAGTGGCTCTGCAGCA |
| | GCTGCACGACAAGAACATCCCTAGCGCCATCAGCA |
| | TCTACCGGTGGTGGCTGGTGTTTAGAGCCAGCGGC |
| | TACAACCCCGTGTCTCTGGCCCCTGACTTTAAGAG |
| | CAGAGGCAACAGAGGCGCCAAGGTGTCCCCTATCG |
| | TGGACTCCATTATCGAGCAGGCCGTGGAAAGAGTG |
| | ATCAGCGGCCGGAAGATCAACATCAGCTCTGCCCA |
| | TCGGAGAGTGAAGCGGAAAGTGCGGCAGTACAATC |
| | TGACCCACGGCACAAAGTACCCCTATCCTAAGTAC |
| | GAGAGCGTGCGGATCAGAGTGAAGAAGAAAACCCC |
| | TTTCGAGGTGCTGGCCGCCAAGAAAGGCGAGAGAG |
| | TGGCCAAGCGCGAGTTCAGAAGAATGGGCAAGAAG |
| | ATTACCACCAGCGCCGTGCTGGAACGCGTGGAAAT |
| | CGACCACACAATGGTGGACATCTTCGCCGTGCATC |
| | CCGTGCACAGAGTGACACTTGGTAGACCCTGGCTG |
| | ACCCAGCTGGTGGACTGTTACTCTAAGGCCGTGAT |
| | CGGCTTCTACCTGGGCTTCGAGCCTCCTAGCTACG |
| | TGTCAGTCAGCCTGGCTCTGAAGAACGCCATCCAG |
| | AGAAAGGACGACCTGCTGAGCAGCTACGAGAGCAT |
| | CGAGAACGAGTGGCTGTGCTACGGCATCCCCGATC |
| | TGCTGGTCACCGACAACGGCAAAGAGTTCCTGAGC |
| | AAGGCCTTCGACAAGGCCTGCGAGAGCCTGCTGAT |
| | CAACGTGCACCAGAACAGAGTGGAAGTGCCCGACA |
| | ACAAGCCCGACGTGGAACGGAAGTACGGCACCATC |
| | AATACCAGCCTGCTGGACGATCTGCCCGGAAAGGC |
| | CTTCAGCCAGTACCTGCAGAGAGAAGGCTACGACA |
| | GCGTGGGCGAAGCCACACTGACACTGGACGAGATC |
| | CAAGAGATCTACCTGATCTGGCTGGTGGATATCTA |
| | CCACAAGGACTCCAACCAGCGGGGCACCAACTGTC |
| | CCAATATCGCCTGGCGGAATGGCTGCCAAGAGTGG |
| | GAGCCTGAAGAGTTCAGCGGCAGCAAGGACGAGCT |
| | GGACTTCAAGTTCGCCATCGTGGATAGCAAGCAGC |
| | TGACCAAGGCTGGCGTGACCGTGTACAAGGGCCTG |
| | ACATACAGCTCCGAGAGACTGGCCGGCTACAGAGG |
| | CAAAAAGGGCAACCACAAGGTGCAGTTCAAGTACA |
| | ACACCGAGTGCATGGCCGTGATTTGGGTGCTCGAC |
| | GAGGACGTGAACGAGTACTTCACCGTGAATGCCAT |
| | CGACTACGAGTACGCCTCTGGCGTGTCACTGTGGC |
| | AGCACAAGTACAATATCAAGTACCTGGCCGAGCTG |
| | AACAGCGCCGAGTACGATGAGGACAAAGAGATCGA |
| | CGCCGAGATCAAGATCGAGGAAATCGCCGACCGGT |
| | CCATCCTGGAAACAAAGAAGATCAGAAGCCGGCGG |
| | AGGGGCGCCAGACACCAAGAAAATTCTGCCAGAGC |
| | CAAGAGCATCAGCAACACCAAGCTGGTGCCTCCAC |
| | AGAAGGACGAGGAAGAGATCGTCATCGTCGACAAC |
| | GAGGACTGGGACATCGGCTACGTGTGA |
| | (SEQ ID NO: 394) |
| tnsC | ATGAACGAGACAAGAGAGGCCCGGATCAGCAAGGC |
| | CAAGAGGGCCTTTGTGTCTACCCCTAGCGTGACCA |
| | AGATCCTGGGCTACATGGACAGATGCCGGGACCTG |
| | AGCGATTTCGAGAGCGAGCCTACCTGCATGATGGT |
| | GTTTGGAGCCTCTGGCGTGGGCAAGACCACCGTGA |
| | TCAAGAAGTACCTGAGCCAGAACAACCGGGACAGC |
| | AAAGTGCGGGGAGAGATCGTGCCTGTGCTGCACAT |
| | TGAGCTGCCCGACAACGCCAAGCCTATCGATGCCG |
| | CTAGAGAACTGCTGCTGGAAATGGGCGATCCCCTG |
| | GCTCTGTACGATACCGACCTGGCCAGACTGACCAA |
| | GAAGCTGACCGATCTGATCCCTCTCGTGGGCGTGA |
| | AGCTGATCATCATCGACGAGTTCCAGCACCTGGTG |
| | GAAGAGAGAAGCAACCGGATCCTGACACAAGTCGG |
| | CAACTGGCTGAAGATGATCCTGAACCGGACCAAGT |
| | GTCCCATCGTGCTGTTCGGCATGCCCTACAGCAAG |
| | GTGGTGCTGAAGGCCAACTCTCAGCTGCACGGCAG |
| | ATTCAGCATCCAGTGCGAGCTGCGGCCCTTCAGCT |
| | ATCAAGGCGGAGAGGGCGTGTTCAAGAAATTCCTG |
| | GAAAACCTGGACAAGCTGCTGCCGTTCGTGAAAGA |
| | AGCCGGACTGGCCGAGAAGAACCTGCAGAAGAAGC |
| | TGTACGCCTTCAGCGAGGGCAACATGCGGAGCCTG |
| | AGAAACCTGATCTACCAGGCCAGCGTGAACGCCAT |
| | CGACAACCACAGAGCCACCATCATCTACGAGGACC |
| | TGGTGGTGGCCGCCGAGCTGACATGTAGCAACAAG |
| | ACCTACACCTGGAAGAACCCCTTCGAGAACGGCGT |
| | GAAAGTGACCGAGGAAATGCTGCGGCCTCCTCCAA |
| | AGGATATCGGCTGGGAAGATTACCTGAAGAACATC |
| | AACAGCCGGTCCAAGAGCAAGCTGAACGGCGGCAA |
| | CATGTTCGAGTGA |
| | (SEQ ID NO: 395) |
| tnsD | ATGCTGCTGCAGAGGCCTAAGCCTCACAGCAACGA |
| | GAGCCTGGAAAGCTTCTTCATCAGAGTGGCCAACA |
| | AGAACGGCTACGAGGACGTGAACAGATTCCTGATG |
| | GCCACCAAGAGATACCTGCAGGACATCGACTGCAG |
| | CGGCTTCCAGACATTCCCCACCAACATCGGCAAGA |
| | TGAACCCCGCCTCTGCCAAGTCTAGCAGCTCTGCC |
| | AGAATCGCCAGCCTGCTGAAACTGGCCCAGCTGAC |
| | CTTCAACGAGCCTCCTGAACTGCTGGGCCTCGCCA |
| | TCAACAGGACCAACCTGAAGTACAGCCCTAGCACC |
| | AGCGCCGTGATCAGAGGCAGCGAAGTGTTCCCTAG |
| | AAGCCTGCTGCGGACCAAGAGCATCCCTTGCTGTA |
| | GCCTGTGCCTGCAGCAGAATGGCTACGCCAGCTAC |
| | CTGTGGCACTTCGAGGGCTACGATCACTGCCACAT |
| | CCACAACACCCCACTGATCACCGCCTGTAGCTGCG |
| | GCAGCGAGTTCGACTATAGAGAGTCTGGCCTGAAG |
| | GGCAACTGCTCCAACTGCAAAGAGCCCATTGCCAT |
| | CAAGAGCAGCGAGGTGTCCCACGAAGTGATCTTCA |
| | CCGTGGCCAACTGGCTGGCCGGCAACGAGTCTAAG |
| | AACCTGCCTGATGTGCCCAAGAGCTACAGATGGGG |
| | ACTCGTGCACTGGTGGCTGCACCTGAACGACAACA |
| | AGTTCGACCATCTGCTGTTCACCCAGTTCTTCAGC |
| | AACTGGCCCTCCAGCTTCCACAGCATGATCGACAG |
| | CGAGATCGAGTTCAACGTGGACCACGCCATCGTGG |
| | GCAGAAAAGAACTGAGAGTGAAGGACCTGATGGGC |
| | CGCATCTTCTTCAGCTCCATCAGACTGCCCGAGCG |
| | GAACCTGCAGCACAACATCGTTCTGGGCGAACTGC |
| | TGAGACACATCGAGACACACCTGTGGAACAGCAAC |
| | GGCCTGATCGCCAACCTGAGAATGAACGCCCTGGA |
| | AGCTGCCGTGTTCCTGAATTGCAGCATGGACGAAG |
| | TGACCAGCATGGTGGAACAGAGAATCCTGAAGCCT |
| | AACCGCAAGACCAAGCCTAACATGCCCCTGGCCGT |
| | GAACGACTACCTGTTCTACTTCGGCGACATCTTCT |
| | GCCTGTGGCTGGCTGAGTTCCAGACCGACGAGTTC |
| | AATCGGAGCTTCTACGTGTCCCGGTGGTGA |
| | (SEQ ID NO: 396) |

[0115] 151543|0|GCA_002892885.1_ASM289288v1_genomic|POSI01000001.1|744368|Vibrio (1D: 121)

TABLE 31

| Elements | Sequences |
|---|---|
| tnsA | ATGTACGTGCGGAACCTGAGAAAGCCCAGCGCCAA |
| | CAAGAACGTGTACAAGTTCGTGTCCGTGAAGAACG |
| | GCTGCAACATCATGTGCGAGAGCAGCCTGGAATAC |
| | GACTGCTGCTACTACCTCGAGTACAGCGACGATGT |
| | CGTGCGCTACCAGAGCCAGCCTAAAGGCTACAGAT |
| | TCCCCTACCAAGGCAAAGAGCACCCCTACACACCC |
| | GACTTTCTGGTGCACAAGAAGGACGGCACCAGCTA |
| | CCTGCTGGAAGTGAAGCCTCTGAGCAAGACCTTCA |
| | GCAGCGAGTTCCAGGACGTGTTCCGGCAGAAACAG |
| | ATCATGGCCAGCGAACTGGGAGCCCCTCTGCTGCT |
| | GGTTACCGACAGACAGATCCGGAACGACGTGCACC |
| | TGAACAACCTGAAGCTGGTGCACCGGTACAGCGGC |
| | TGCATCGGCAATAGCAGCCACCTGGAATCTGTTTG |
| | GAGCGCCGTGAACCAGAGCAGCAGCATCTGTATCA |
| | AGGCCCTGAGCGCCATCCTGAACCTGACAATCGGC |
| | GAGGTGTTCGCCAGCGTGCTGAGACTGATCGGACT |
| | GGGCAAAGCCAAGACCAAGCTGGACGTGCTGCTGG |
| | ACGAGAACAGCCTGATCTCTGTGGCCTGA |
| | (SEQ ID NO: 397) |
| tnsB | ATGAGCTTCGGCCCCTTCGAGGATGAGTTCGGCAG |
| | CATCACCAACGACGTGCAGCAGCAGTATGAGGCCT |
| | CTCCTGAGGCCAAGCTGAGCCGGCTGAAGTACTCT |
| | CCTCTGGAAACCACCAAAGTGATCGAGCGGGACCT |
| | GAGCAGCTTCCCCGAGGAACAGAAACTGAAGGCCC |
| | TGGAACGGTACAAGCTGATCTCCCTGATCGCCAAA |
| | GAGATCAACGGCGGCTGGACCCCTAAGAATCTGAT |
| | CCCTCTGATCGACAAGCACATCGAGACACTGAACA |
| | TCCCCAAGCCTAGCGACCGGACCGTGAAGAGATGG |
| | TACAAGGCCTTCTGCGAGAGCGACGGCGACATCAA |
| | GAGCCTGGTGGATAGCCACCACCTGAAGGGCAACA |
| | GACAGCCCAGAATCGAGGACGACGAGCCATTCTTC |
| | ATCGAGGCCGTGGAAAGATTCCTGGACGCCGTGCG |
| | GCCTAGCTACAGCAAAGCCTACCAGGTGTACTGCG |
| | ACCGGATCGAGATCGAGAACAGCACCATCGTGTCC |
| | GGCAAGATCGCCAAGGTGTCCTACGAGGCCTTCAA |
| | GAAGCGGCTGAAGAAGCTGCCTCCTTACACAGTGG |
| | CCCTGAAGCGGCACGGCAAGTACTACGCCGACAAG |
| | CTGTTCAACTACTATGAGGCCGTGAAGATGCCCAC |
| | ACGGATCCTGGAAAGAGTGGAAATCGATCACACCC |
| | CTCTGGACCTGATCCTGCTGGACGATGAACTGCTG |
| | GTGCCTCTGGGCAGAGCCTACCTGACACTGCTCGT |
| | GGATGTGTTCAGCGGCTGCATCATCGGCTTCCACC |
| | TGGGCTTTAAGGCCCCAAGCTACACCGCCGTGTCC |
| | AAGGCCATCATCCACAGCGTGAAGTCCAAAGAATA |
| | CGTGAACGAGCTGCCCATCGGCCTGAGCAACCAGT |
| | GGATCTGCCACGGCAAGATTGAGAACCTGGTGGTG |
| | GACAACGGCGCCGAGTTTTGGAGCAAGTCTCTGGA |
| | CCAGGCCTGCATTGAGGCCGGCATCAACATCATCT |
| | ACAACAAAGTGCGGAAGCCCTGGCTGAAGCCCTTC |
| | GTGGAACGGAAGTTTGGCGAGCTGATCCAGGGCAT |
| | CGTTGGCTGGGTTCCCGGCAGAACCTTCAGCAACG |
| | TGCTGGAAAAAGAGGACTACGACCCTCAGAAAGAC |
| | GCCGTGATGCGGTTCAGCGTGTTCGTGGAAGAACT |
| | GCACCGGTGGATCATCGACGTGCACAATGCCAGCG |
| | CCGACAGCCGGCACACAAGAATCCCTAACTACCAC |
| | TGGCAGAAAAGCGAGGAAGTGCTGCCACCTCCTGC |
| | TCTGACCGAGAGAGATGAGATCCAGTTCAGAGTGA |
| | TCATGGGCATGGTGCACAAAGGCGCCCTGACCAGC |
| | AAGGGCATCAAGTTCAAGCACCTGATGTACGACAA |
| | CGTGGCCCTCGAGCACTACCGGAAGCAGTACCCTC |
| | AGAGCAAGGACAGCCGGATCAAGACAGTGAAGATC |
| | GACCCCGACGACCTGAGCCGGATCTTCGTGTTTCT |
| | GGAAGAGAAGAAAGGCTACATCGAGGTGCCCTGCA |
| | AATACGATCCCCTGGGCTACACCAAGAAACTGAGC |
| | CTGTGCGAGCACCTGAGAACCGTGAAGGTGCACCG |
| | GGACTTCATCAAAGGACAGGTGGACAGCCTGAGCC |
| | TGGCCAAAGCTAGACAGGCCCTGCACGAGCGGATC |
| | AAGCAAGAGCACGAGAACCTGCGGCAGATGAGCCT |
| | GCCTCACAGAGCCAAGAAGGCCAAGAACGGAAAGA |
| | AGATGGCCGAGCTGGCTGGCGTGAACAGCGATAGC |
| | CCTAAGTCCATCACCACAGACTACCCCATCGAGGA |
| | CACCATCCAGCTGCACGAGAGCACCCCAGTGGATG |
| | ATCTGCAGAGCCTGTGGAACAAGCGGAGAGCCCTG |
| | AGAAAGTCTGGCAAGTGA |
| | (SEQ ID NO: 398) |
| tnsC | ATGACAAGCCTGCAGCCTACCAACAACGACGTGGA |
| | CGTGCTGCTGGCCGAGTTCCACCAGAGCTTTGTGG |
| | TGTACCCCGACGTGGAAAAGGTGTTCGAAGGCCTG |
| | GATTGGATCGTGCGGAGAAGCCAGTTCGGCAAGTT |
| | CGCCCCTAGCATGCTGATCACTGGCGGAACAGGCG |
| | CCGGAAAGACAAGCGTGGTGGAAATCTACCTGAAC |
| | AACCACTTCAGCAGCAGCGAGGTGCTGATTACCAG |
| | AGTGCGGCCCAGCTTCGTGGAAACCCTGATCTGGG |
| | CCATCGAGAAGCTGAACGTGCCCTACAACAGCAGA |
| | AGCAAGCGGAGCGAGATCGGCCTGCAGGACTACTT |
| | CATCAACAGCGTGAAGAAGTCCAAGCTGAAGCTGC |
| | TGGTCATCGAGGAAGCCCAAGAGCTGTTCGAGTGC |
| | GCTAGCCCCAAAGAGCGGCAGAAGATCCGGGACAG |
| | ACTGAAGATGATCAGCGACGAGTGCAGACTGCCCA |
| | TCGTGTTCATCGGCATCCCTACCGCCAAGCTGATC |
| | CTGGAAGATAGCCAGTGGGACAGACGGATCATGGT |
| | CAAGCGGGACCTGCCTTACATCCGGATCACCAACG |
| | AGGAATCCCTGGACGTGTACATTGCCCTGCTGGAA |
| | GGACTGGAAAAGACCCTGCCTATCAGCGTGGCCCC |
| | TGAGCTGACCGATATGGATATGGCCATGAGACTGC |
| | TGGCTGCCTCCAGAGGAATGCTGGGCCTGATCAAA |
| | GAACTCGTGGGCTACGCCTTTGAGCTGGCTCTGCT |
| | CGAGGGCAAGAGACAGATCACCCAGAACGAGTTCG |
| | TGCAGGCCTTCAAGAGCATCTTCGGCCCCGACATC |
| | AGCAACCCCTTCGAGATCGAGCTGGACAAGCTGCT |
| | GATCCCTCAGATCATCGAGTACGAGGGCTACCTGC |
| | TGGACAGCGACAGCGGCGATATCAAGTTCACCCAC |
| | CAGATCTTCGAGGACATCCCTCTGACCGAGCTGCT |
| | GAGATGA |
| | (SEQ ID NO: 399) |
| tnsD | ATGGACACCGACATCGAGGTGTACAGCGACGAGAG |
| | CCTGGAAAGCTTCCTGCTGCGGCTGAGCAAGTTCC |
| | AGGGCTACGAGAGATTCGCCCACTTCGCCGAGGAC |
| | ATCTGGCAGACAACACTGCTCCAGCACGAGGCTAT |
| | CCCTGGCGCCTTTCCATTCGAGCTGAGCCGGATCA |
| | ACATCTACAAGGCCCAGACCACCAGCCAGATGAGA |
| | GTGCGGGTGCTGATCGACCTGGAAAAGCGGCTGAA |
| | GTTCAACGACTTCGGCGTGCTGAGACTGTCTCTGG |
| | CCCACAGCAAAGCCAGCTTCAGCCCCGATTACAAG |
| | GCCGTGAACAGATACGGCGCCGACTATCCTCAGGC |
| | CTTCCTGCGGAAGAACTTCACCCCTGTGTGCCCCA |
| | AGTGTCTGGATGAGGCCGCCTATATCAGACAGCTG |
| | TGGCACTTCATCCCTTACCAAGTGTGCCACAAGCA |
| | CCATTCTCAGCTGGCCCAGAGATGCCCTGAGTGTG |
| | GCAAGCTGCTGAACTACCAGAGCAGCGAGCTGATC |
| | GAGAACTGCGAGTGCGGCTTCAGCCTGCTGAATGG |
| | CGAGAGCGAGAAAGAGAGCTGCAGCACCCTGTTTG |
| | TGGCCCAATGGCTGGCCGGCGAGAAGCCTGTTGAA |
| | AGCGGCCTGATGAGCCAAGAGCTGACCCAGTCCAG |
| | CAGATTCGGCTTTCTGCTGTGGTACATCAACCGCT |
| | ACGGCGAGCTGGACGACATCAGCTTCGATGGCTTC |
| | GTGGAATGCTGCAAGAGCTGGCCTAACAAGCTGAA |
| | CACCGACCTGGACAGCATCGTGCAGAAGGCCGACA |
| | TCGTCAGAATCCAGCCTTGGAACAAGATCTACTTC |
| | AGCGAGGTGTTCGGCGACCTGCTGAAAGAGTGCAG |
| | AAGCCTGCCTAGCCGGGACCTGAGCAAGAACCCCG |
| | TGCTGAAGAACGTGGTGCTGTACTTCAGAGCCCTG |
| | ATCACCAACAATCCCAAAGTGAAGTCCGCCAACAT |
| | CGGGGACGTGCTGCTGTCTCCTCTGGAAGCCTCTA |
| | CACTGCTGAGCTGCACCACCGACGAGATCTACCGG |
| | CTGTACCAGTTCGGACAGCTGAAGGCCCAGCACAC |
| | CCCTAAGCTGCAGAGCAAGATCGAGAATCACCACA |
| | GCGTGTTCACCCTGCGGAGCATCATCGAGCTGAAA |
| | CTGAGCAGCATGTGCAGCGAGACAGACGGCCTGAA |
| | CCACTACCTGCCTGAGTGGTAA |
| | (SEQ ID NO: 400) |

[0116] 154441|0|GCA_002966495.1_ASM296649v1_genomic|CP016490.1|3650492|Hal omonas (ID: 122)

TABLE 32

| Elements | Sequences |
|---|---|
| tnsA | |
| tnsB | ATGTACACCAGAACACTGCGGCCCTCTCCAATCAA |
| | GCACATCTACAAGTTCGCCAGCCACAAGAACGGCA |
| | ACGTGCAGACCGTGGAAAGCAGCCTGGAATTCAAC |
| | GCCTGCTTCCACTTCGAGTACGCCAACGAAGTGCG |
| | GAGCTTTATCGCCCAGCCTGAGGGCTTCTACTACC |
| | AGTTCGAGGACCGGACCTGCAGCTACACCCCTGAC |
| | TTCGAGCTGTTCTGCCACAGCGGCAAGAAAGTGTT |
| | CGTGGAAATCAAGCCTCCTCCAGAGGCTCTGAAGC |
| | ACGACTTCATCCAGCGGTTCACCGCCAAGAAAAAG |
| | GCCGTGGAAATGCTGGGCAAAGAGCTGATCCTGGT |
| | CACCGACAGACAGATCAGCAGCATGCCCAAGCTGA |
| | AGAACCTGAAGCTGATCAACAGATACGCCGGCCTG |
| | TACACCGAGGTGGTGTCCCGGAAGAAAATCTACGA |
| | GTGGATCCGGAAGTTCCAGGGCCTGACAATCGCCG |
| | ACATCAGCGAACTGTCTGGCGCCGATAGCAGCGAG |
| | ATCCTGGTGGATGTGATGTGGCTGGTGGCCTCCGG |
| | CAAGGTGTTCATCAACATCGAGGAAATCTTCGGCT |
| | ACGAGAGCTTCTTCGGCCTGGAACGGGCCATGAGC |
| | ATCGATTTCTTCAACGACGAGTTCCCCGACTTCCA |
| | GAACTGGAAGGCCAGCGCCTTTGTGGACGCCCAGT |
| | ACATGACAGCCAGCGAGCACCTGAGCTACATCAGC |
| | TTCGACAGCCTGAGCAACAAGCTGCAAGAGGAAGC |
| | CTACTACAAGTACAAAGTGATCATGCTCGTGGGCG |
| | AGAGACTGCAAGGCGGCTGGACCAAGAAGAACATC |
| | GAGCCCATCATCAACAGCCTGTTCGAGAAGGGCTA |
| | CATCGAGAAGAAGCCCAGCTATCGGAGCGTGGCCA |
| | GATGGCACAAGAGCTACGATCAGGACATCGGCCTG |
| | AAGTCCCTGGTGTCTGCCAAGGGCCTGATGAAGTC |
| | CCCTGGCAACAGCAAGAAGGACGACGCCGACTTCT |
| | ACAAGAGAGCCGTGGAAGAGAAGTTCCTGAAGCGC |
| | GAGAGGCCTCACGTGTCCACCGCCTACTACCACTA |
| | CTTCAACAACATCCTGCTGTACAACCGGGCTCACC |
| | CCGACAACATCATCGAGCCTATTACCAAGAGCGCC |
| | TTTTACAAGCGCGTGAAGAAGATGAGCCCCTACGA |
| | GGTGGAAGTGGGCAGATTTGGAAAGGCCGAGGCCG |
| | ACAAGAACTACCGGATCGTGAACAAGTTCAGCAGC |
| | CCCGAGCGCGTGATGGAAAGAGTGGAAATCGATCA |
| | CACCCCTCTGGACCTGATCCTGCTGGACGATACCC |
| | TGCTGATCCCCATCGGCAGACCCTACCTGACCATC |
| | CTGATCGACTGCCTGTCCAGATGCATCATCGGCTT |
| | CTACCTGAGCTTCCAAGAGCCTAGCTACAACAGCG |
| | TGCGGAGCGGCATCATGAACGCCTGCCTGAACAAA |
| | GAAGGCGTGATCGAGAAGTACCAGATGATCAAGAA |
| | GGATTGGCCCTGCCAGGGCAAGATCGAGACACTGG |
| | TGGTGGATAACGGCGCCGAGTTCTGGTCCAGCAAC |
| | CTGGAATACTTCTGCGCCAGCGTGGGCATCAATAT |
| | CGAGTTCAACCCCGTGGGCAAGCCCTGGAAGAAAC |
| | CCCTGGTGGAAAGACTGTTCGCCATCTACAACTCC |
| | AAGTTCGTGAAAGAGATCCCCGGCACCACCTTCAG |
| | CAACGCCCAAGAGCTGAGCGGCTACAAGCCTGAGA |
| | AAGACGCCGTGCTGCCCTTCAGCTACTTCATCGAG |
| | CTGATGCACGTGTGGGTCGTCGATATCTACAATCA |
| | GAGCCCCAACAGCCGGATGACACGGATCCCTGCTC |
| | TGTCTTGGGAGATGGGCTGCAAGAAGTACCCTCCA |
| | CCTCTGTACAGCGGCTTCGAGGAAAAGATCTTCAA |
| | GATTGAGGCTTTCCCCACCGAGAGCCGGATCCTGA |
| | GAAAAGGCGGCATCAGCATCGACGGCATCGACTAC |
| | ACCAACGAGGAACTGGTGGAATACCGGAAAGTGAC |
| | CCCTCCACCACCTGGCAGCAAGGTGGTCAAGGTCG |
| | TGATCAAGAGGGACCCCGAGGACGTGTCCTACATC |
| | TACGTGTACCTGGTCGAGCGGAAAGAGTACATCAA |
| | AGTCACCGCCGTGGATCCCGATTGCCTGTACGATG |
| | GCCTGAGCATCTTCCAGCTGAAAGTGCGGCGGAAG |
| | CTGCGGAGAAACTTCATCAATAGCAAGACCGACTA |
| | CCTGGGCGTCGCCGAAGCCGAGAAGCTGATTGACG |
| | ATCGGGTGTCCGAGATCGCCGAGGAAGTGTCTGCC |
| | TCTAAGAAGAAGATCAAGGGCACCAAGAAGGCCGC |
| | TGCCTACTTCGGCATCTCCAGCGAGAATCCCAGCA |
| | GCATCATGGACGGCTTCGCCAGCAAAGAGATCGTT |
| | AATATCGAGGAAGAGAGCAAGAGCCACTCCGGCGT |
| | GAACCCCAACGATGAGGAATGGAAGCGGATCAGCG |
| | ACGACCTGGAACCTTACAGCTGA |
| | (SEQ ID NO: 401) |
| tnsC | ATGAGCATGCTGATCTCCAACGAGAAGCTGGAACA |
| | GCAGATCTACTTCAAGAACTGCTACGTGAAGCACA |
| | GCAGCGTGGCCAGAGCCATCAGCAGCCTGGAAATG |
| | CTGAAGGCCAATCACGCCCTCGGCGGAGAGCAACA |
| | GTGTATGCTGATCATCGGCGATCCCGGCAGCGGCA |
| | AAAGCAGACTGGTGCAAGAGTTCCAGTCTCAGTAC |
| | CCCGAGTACGTGGAAAACGACACCGTGATCAAGCC |
| | CGTGCTGGCCTCTAGAATCCCCAGCAAGCCTGACG |
| | TGGAATCCATGCTGATTCAGCTGATGATGGACCTG |
| | GGCCAGTTTGGCGCCGACACCAGAAGAGAGAGAAG |
| | AAGAGAGGCCGGACTGGCCGAGGCTCTGGTCAAGA |
| | TGCTGAAGAAATGCAAGACCGAGATGATCATTATC |
| | AACGAGTTCCAAGAGCTGATCGAGTTCAAGTCCGT |
| | GGAAGAGAGACAGCGGATCGCCAACATCCTGAAGC |
| | TCGTGAACGAGAAGGCCAACATTCCCATCGTGCTC |
| | GTGGGCATGCCTTGGGCCGCTGAGATCTCTAATGA |
| | ACCCCAGTGGGCCAGCAGACTCGTGTGCACAATCG |
| | AGCTGCCTTACTTCAAGTTCCTGAACCTGGAAGAT |
| | CGGGTCGAGTTCACCCGGTTCATCAAAGGCCTGGC |
| | CAGCAAGATGGGCTTCGAGAAGCCTCCTGGCCTGC |
| | ACAGCAACGAGATCCTGTTTCCTCTGTTCAGCGTG |
| | ACCAGGGGCGAGACACGGCAGATCAAGAGAATCCT |
| | GGAAGCCGCTCTGTGCGTGGCCCTGAGCAAGAACG |
| | AGAACACCGTGTGCAAGTACCACTTCGTGGACGCC |
| | TGCGACAAGATCTTTGTGGGCATGAACAACCCCTT |
| | CAAGCTCGAACTGGAAGATGTGCCCATCAGCGAGG |
| | TGTCCAAGTACAGCAGCTACAACCGGTACAGCACC |
| | GTGGAAAGCGAGATGTTCGTGTCTACCCAGTTTAC |
| | CCGGAAGATCCCCACCAAAGAGCTGTTCAGCAAGA |
| | CCTGA |
| | (SEQ ID NO: 402) |
| tnsD | ATGAAGCTGCTCGTGCGGCCCAGACCTTTCATCAA |
| | CGAGAGCCTGGAAAGCTACATGCTGCGGCTGAGCC |
| | AAGAGAACTTCTTCGAGTACTACCAGCAGCTGAGC |
| | CGGGCCATCAAGGATTGGCTGCAACTGCACGATCA |
| | CGAGGCCGCTGGTGCCTTTCCTGAGGAACTGAGCA |
| | GACTGAACGTGTACCACGCCGCTCAGAGCAGCAGC |
| | AGAAGAATCAGAGCCCTGAAGCTGGTGGAAAGCCT |
| | GACCGACAACGAGAAGCTGCCTCTGCTGCATCTGG |
| | CCGTGATGCACAGCAGCGAGAAGTTCTGCAGCCGG |
| | TACAGCAGCGTGTTCTACGCCGGATCTCACGTGCC |
| | AAGAGCACTTGTGCGGCAGAAAGGCATCCCTGTGT |
| | GCCCTGATTGTCTGACCGAGGCCAACTACATCCGG |
| | CAAGAGTGGCACTGGATGCCCTACGAGGCCTGCAT |
| | CAATCACGGCAAGCAGATGCTGCACGAGTGCCCCA |
| | AGTGCGAGGAAAAGCTGAACTACACCCACAGCGAG |
| | TGCCTGCACACCTGTAGATGCGGCTTCGACCTGAG |
| | AAACGCCGATACCGAGCCTGCCGATGAGTGGCAGC |
| | TGATCGCCTCTAGACTGGTTGTGGGCGAGCCCTCT |
| | CCTAGCAATCACCCTCTGCTGGACATCAGAAGCGT |
| | GTCCCTGAGACTGGCCTGCCTGCTGTGGTATCAGC |
| | TGTACGCCTACAAGACCCTGGACGCCAGCAATCAG |
| | GTGCCCACACTGACAATCGAGCGGGCCATCGAGTA |
| | CTTCACCCACTGGCCTGAGGTGTTCACCCAAGAGC |
| | TGGAACAGCAGGCTGCCCTGTCTGGCGAGAAGCTC |
| | GTGTGCGACTACAACAAGACCAGCTTCCGGGACGT |
| | GTTCGGCAACATCGTGGGCATCAGTCGGCTGCTGC |
| | TGAAGGCCTATCCTGAGAGCGACTTCGTGCTGACC |
| | CCTCTGGAAAACTTCCTGGCCAGACTGGTGGACCA |
| | GAATCCACAGAGCAGAGTGCCCAACGTGGCCGACC |
| | TGCTGATCTCTATGCCTGAGGCCGCTATCCTGCTG |
| | GGCACATCTTACGAGCAGGCCTACCGGCTGTACGA |
| | AGAGGGCTATCTGAAGTGCGCCGTGAAGTTCAAGA |
| | GCCACGAGAAACTGGTCAACGGCATCGGAGTGTTC |
| | TACCTGCGCGAGATCATGGAACTGCGGCAGAGCAG |
| | AATCCCCGTGGAAGCCAGCAGCTACAACAACTACC |
| | TGCCTGCCTGGTGA |
| | (SEQ ID NO: 403) |

[0117] 156623|17|GCA_003025425.1_ASM302542v1genomic|PYLX01000025.1|5240 1|PhotobacteriTm (ID: 123)

TABLE 33

| Elements | Sequences |
|---|---|
| tnsA | ATGCAGCCTTCTCCTGCCACCACCTACCAGACAGA |
| | CAGCCCTCTGGAATTCGCCTTCACACAGCCCGCCA |
| | GAAAGCTGACCAAGAGCCGGGGCAAGAACATCCAC |
| | AGATACGTGTCCATCAAGATGAACACCATCATCAG |
| | CGTGGAAAGCACCCTGGAATTTGACGCCTGCTTCC |
| | ACTTCGACTTCAACAAGAATATCAGCCGGTTCTGC |
| | AGCCAGCCTATCCGGTACAGCTACGTGATCGACGG |
| | CATCATCAGAACCTACGTGCCCGACTTCCTGTGCG |
| | AGTTCGATTGCGGAGAGATGGTGCTGTACGAAGTG |
| | AAGGCCCCTAACGCCGTGAACAGCAAGCGGTTCAC |
| | CAAAGAGTTCGAGGCCAAGCGGCAGTACGCCCGGA |
| | AGCTGTTTGATGTGGACCTGGAACTGATCGAGGAA |
| | CACGACATCCGGCACATCCCTCTGCTGAAGAACCT |
| | GAAGCACATGCACCGCTACGCCAGCCACAGCGAGC |
| | TGACATACGAGCAGACCACCATCCTGAAGTATCTG |
| | AACAAGCACGGCAGCACCAAGCTGGAAACCATCAT |
| | CGACCACTTCAGCAACTCTAAGAACATCATCCCCA |
| | TGATCTACGACCTGCTGAGCAAGTACCTGATCAAC |
| | ACCGACCTGCGGGTGCTGCTGAACAACCAGACCGA |
| | GCTGAAAACCACCTACGTGTGA |
| | (SEQ ID NO: 404) |
| tnsB | ATGAGCAGAACCAGCTTCAGCAGCTTCCACGGCAC |
| | CCCTACAAGCGACAGCGAGAATGCCAGCAGCAAGC |
| | TGACCTTCATCGAGAACGACGACCTGCAGGACCTG |
| | ACCAGCTTCTCCAAGAAGGCCCAGAACGAGGCCAA |
| | GTTCCGGCTGAGCATCCTGCGGAACATCCTGAACA |
| | AGAGCAGCGAGATCAACCTGGTGCTGATCGAGAGA |
| | CTGCGGGCCGATCTGCAACAACAGGGCGAGAGATC |
| | TATCCCCAGCGCCATCACCATCTACCGGTGGTGGC |
| | TGACCTACAAGAAGTCCAACTTCAGCATCCTGAGC |
| | CTGGTGCCTAAGACCAAGCAGAAGGGCAACAGAAA |
| | CACCAAGGTGCCCAAGACAATCAGCGTGTACATCG |
| | ACCAGGCCGTGGAACAAGTGATCAGCGCCAACAAG |
| | ATCAACGTGTCCACCGCCTTTCGGAGAGTGCGGAG |
| | AAAAGTGCGGCAGTACAATCTGACCCACAAGACGA |
| | AGCACACATACCCCAGCTACGAGGCCATCCGGAAG |
| | AGAGTGAAGAAGATCACCCCTTACGAGAAACTGGC |
| | CGCCAGCAAGGGCGACAGAATCGCCAAGCGCGAGT |
| | TCAGACGGATGGGCAAGAAGATCCAGACCGAGTAC |
| | CTGCTGGAACGCGTGGAAGTGGATCACACCTGGCT |
| | GGATCTGTTCGCCGTGCACGAGGAACACAGAGTGC |
| | CTATCGGCAGACCCTACCTGACACAGCTGGTGGAC |
| | TGTCACAGCAAGAGCGTGATCGGCTTCTACCTGGG |
| | CTTCGAGCCTCCTAGCTACATGTCTGTGGCCCTGG |
| | CTCTGAAGAACGCCATCAAGCGGAAGGACAACCTG |
| | CTGCAGAACTACCCCAGCATCCAGAATGAGTGGCT |
| | GTGCTACGGCATCCCCGATCTGCTGGTCACCGACA |
| | ACGGCAAAGAGTTCCTGAGCAAGGACTTCACCCTG |
| | GCCTGCGACAGCCTGCTGATCAACATCCACCAGAA |
| | CAGAGTGGAAACCCCTGACAACAAGCCCCACACCG |
| | AGAGACAGTACGGCACCACCAATACCGAACTGCTG |
| | AACGACCTGCCTGGCAAGACCTTCAGCAACTACCT |
| | GCAGAGAGAGGGCTACAACAGCAGCGACGAGGCCT |
| | CTCTGACACTGTCCGAGATCAAGCAGATCTACCTG |
| | ACTTGGCTGGTCGACATCTTTCACCCCAGACCTAA |
| | CAGCCGGGGCACCAACTGTCCCAACAGAGTGTGGA |
| | AGCACGCCGAGAAGAACTGGCCTCCTAACGAGTTC |
| | CTGGGCACCGACGAGGAACTGGACTTCTACTTCAC |
| | CAAGCTGGACAAGCGGATGCTGCGGAAAGAAGGCA |
| | TCGGACTGGCCACCGAGCTGTTCTACAGCTCTGAG |
| | AGACTGGCCGAGTACCGGGGCAAGAAAGGCAATCA |
| | CAAGGTGGCCATCAAGTACAACCGCGAGAACATGG |
| | GCTTCATCTGGGTGCTCGACGAGGACACCGAGTCC |
| | TACTTTAAGGTGCCCGCCATCGACTACGAGTACGC |
| | CAGCACAGTGACCCTGTGGATGCACAAGAAGAACC |
| | TGAAGATTAAGCAAGAGCTGAACATCACCGAGCAC |
| | AACCTGGACTCCGAGATCGACGCCGAGCTGAGAAT |
| | CGACGAGATCGTGGACCAGTCCATCCAGAAGAAGA |
| | AAACCACCATCACCAACAAGCGGAGAGCCGCCAGA |
| | TACCAAGAGAACGAGCAGATGGCCGCCAACGCCAG |
| | ACAGCCCAAAGAGAAGAAGTCCGCCAACAACCAGA |
| | AAACCAGCACCAAGAACATCGAGAAAGAGGACAGC |
| | AGCGGCTGGGACATCGATTACGTGTGAG |
| | (SEQ ID NO: 405) |
| tnsC | ATGGACGACAACATCACCAGAATCGCCAAGGCCAA |
| | GAAGGCCTTTATCAGCACCCCTGACGTGGCCGCCA |
| | TCATCAACAACGTGGACAGATGCAGACGGCTGAGC |
| | AAGTTTGGCGCCGAGCCTAGCTGCATGATGGTGTA |
| | TGGTGCTAGCGGCGTGGGCAAGACCAGCATCATCC |
| | GGAAGTACCTGAAGGCCAACGACAAGGACAGCACC |
| | GCCAGACAGGATATCGTGCCCGTGGTGTACATCGA |
| | GCTGCCCGAGAATGCCAAGCCTGTGGATGCCGCTA |
| | GAGAGCTGCTGCTGTACCTGGAAGATCCCCTGGCT |
| | CTGTACGAGAGCGATCTGGCCATCCTGACCAAGCG |
| | GATCGTGGATCTGGTGCCCACCATGAAGATCGAGC |
| | TGATCATCATCGACGAGTTCCAGCACCTGGTGGAA |
| | AAGAGCAGCAACCGGATCCTGAGCAGAGTCGGCGA |
| | CTGGCTGAAGATGCTGATCAACAAGACCAAGTGTC |
| | CCGTGATCCTGTTCGGCATGCCCTACAGCAAAGTG |
| | GTGCTGGCCGCCAACACACAGCTGCGGAGCAGATT |
| | CAGCATCCAGTTCGAGCTGAAGCCCTTCTCCTACA |
| | TCAACAATTACGGAATCTACGCCGGCTTCCTGCGG |
| | AGACTGGATGAGGCCCTGCCTTTCGACCAGCTGAG |
| | CAATCTGGCCTCTGAGCCTATCGCCAAGAAGATCT |
| | ACGCCTTTAGCCAGGGCAACATGCGGAGCCTGAGA |
| | AACCTGGTGTTTCACGCCGCCGTGAACGCCATCGA |
| | GAACGACAACAACTGCATCAGCAAGAACGACTGGG |
| | AGTTCGCCAGCAACCTGACCAGCGGCAACAAGCTG |
| | AGCACATGGAAGAACCCCTTCGTGCAGGGCGTGAA |
| | GATCACCGACAGAATGCTGCAGGACCAGCCTAACG |
| | ATCTCGGCTGGGAAGATTACATGCGGAACAACAAG |
| | GGCAAGCGCAAGCCCTTCGACGAGAGCAAGATCTT |
| | CAGCTGA (SEQ ID NO: 406) |
| tnsD | ATGTTCCTGCAGAGGCCTGAGCCTCACTCCGACGA |
| | GAGCCTGGAAAGCTTCTTCATCAGAGTGGCCAACA |
| | ACAACGGCTACGAGGACATCCACCGGTTTCTGATC |
| | GTGACCAAGAGATACCTGCAGGACGAGAACCACGA |
| | CAGATTCGAGGCCTTTCCTACCGACATCAAGACCA |
| | TCAATCCCTACAGCAGCAAGAACAACCACGGCAGC |
| | AGAGTGGCTGCCCTGCACAAGATTGCCCTGATGAC |
| | CTTCAACGAGCAGACCGAGATCCTGAGCCTGGCCA |
| | TCAACAGAACCAGCCTGATCTACAGCCCCAGCACC |
| | ACAGCTCTTGTGCGGGGCTCTGAAGTGATCCCCAG |
| | AAGCCTGCTGCGGAAGAACACAATCCCTTGCTGCC |
| | CCAGATGCCTGTACGAGGAAGGCTTTGGCCACTAC |
| | CTGTGGCACTTCAATGGCTACAACCACTGCCACAA |
| | GCACAACGCCCTGCTGACCTACAAGTGTGCCTGTG |
| | GCGCCGACTACGACTACAGAATCGCCGGCCTGAAT |
| | GGCCTGTGCAGAGAGTGCGACACCTATCTGAACCC |
| | CAACCAGCAGCAGCCTGACAGCGCCGAGAACAAGA |
| | CATCTGCTTGGCTGGCCGGCAAGACAATCGAGCAG |
| | CTGCCTGATCTGCCCCAGTCCTATAGATGGGGCCT |
| | GATCCATTGGTGGGCCCATCTGACCCAGAAAGAGT |
| | TTGACGGCGCCAGCTTCATCGATTTCTGGCACAGA |
| | TGGCCCGAGAGCTTCCACCACCTGATCCAGCAGAA |
| | GATCGAGTTCAACCTGGAACACAGCATCATCCACC |
| | ACGACAACCTGAAGCTGAAGGACCTGCTGGGCGAC |
| | CTGTTCTTCAGCTGCATCAGACTGCCCGAGCGGAA |
| | CCTGAAGTACAACATCGTGCTGAACGAGCTGCTGC |
| | GGTTCATCGACAACAACCTTTGGAGAGACAATGGC |
| | CTGCTGGCCAATCTGAAGATGAACGCCCTGGAAGT |
| | GTCCATCTTCCTGAACTGCAGCCGCGAGCAGATTG |
| | TGCTGATGGTGGACCAGCGGTTCCTGAAAACCAGC |
| | CGGAAGGCCAAGCCTAACAAGCCCCTGAGCTTCAC |
| | CGACTACCTGTTCCATCTGGGCGACGTGTACTGTC |
| | TGTGGCTGGCTGAGTTCCAGACCGACGAGTTCAAT |
| | CGGACCTTCATCATCAGCGGCTGA |
| | (SEQ ID NO: 407) |

[0118] 162445|18|GCA_003201885.1_ASM320188v1_genomic|QJJG01000019.1|12806 7|Klebsiella (ID: 124)

TABLE 34

| Elements | Sequences |
|---|---|
| tnsA | |
| tnsB | ATGTACAGACGGCATCTGCACCACAGCAGAGTGAA |
| | GAACCTGTTCAAGTTCGCCAGCGTGCGGATGGGCA |
| | TCGTGCTGACACTGGAAAGCAGCCTGGAATTCGAT |
| | ACCTGCTTCCAGCTCGAGTACAGCCCTGCCGTGAA |
| | AACCTACATCAGCCAGCCTGAGGGCTTCTACTACG |
| | AGTTCGAGGGCAAGAGCTACCCCTACACACCCGAC |
| | TTTCTGGTCAAGGACCAGAACGACCAAGAGTTCCT |
| | GCTGGAAGTGAAGCCCAGCAGCCAGATCGACGATA |
| | TCGACTTCCTGCAGCGGTTCCCCGCCAAGCAGAAG |
| | AAGGCCAAAGAACTGGCCTCTCCTCTGATCCTGAT |
| | CACCGAGAAGCAGATCAGAAGCACCCCTCTGCTGG |
| | ACAACCTGAAGCTGGTGCACAGATACGCCGGCTTC |
| | CACAGCATCATGCCCAGCTGCAACGAGATCATGGA |
| | ACTGCTGCGCGAGCAGAAAGAGGTGGCCATCTTCA |
| | ACCTGTGCGAGAGCATCGACATCCCTCAGGGCGAG |
| | ATGTACAGCAGCATCCTGCTGCTGCTGAGCAGGGG |
| | CCTGATCAGCGGCAATCTGATGGAAAGCGAGTTCG |
| | GCCTGGTCACCCTGCTGAAATACGCCCAGCAGAAC |
| | AGCCTGTTCATCTGCAGCTTCCCATTCGAGGACGA |
| | GTTCACCCTGAGCCAAGAGAACGAAGTGAAGATGA |
| | GCACCGACGAGTCCAGCGACATCATCCTGCCTGCC |
| | ACACTGGACTGCTACAGCGAGATCCTGAAAGAGGA |
| | AAGCGTCCGGCGGCTGAACTACATCCAGTGGGTCG |
| | AGAAGAGAATCATCGGCGGCTGGACCGAGAAGAAC |
| | ATCACCCCACTGATCAACGAGGTGGCCCAGACACT |
| | CAGACCTCCAGCTCCTCATTGGAGACAGCTCGTGC |
| | GGTGGCACAAGAAGTACCTGCAGCACAGGCGGCAG |
| | ATCACAGCCCTGGTGCCTAACCACAAGAACAAGGG |
| | CAACAAGACCCAGCGGGTGTCCAGCCGGGAAGAGA |
| | TCTTCATCGAGAACGCCATCCTGAAGTTCCAGAGC |
| | AAAGAGCGGCCCAGCATCAGCAGCATGTACTGCTT |
| | CTACTGCGACTCCGTGCGGATCTTCAATCTGAGCA |
| | ACAGCACCGAGCGGATCAAGACCGTGTCTCTGAAC |
| | ACCTTCTACCGCCGGATCAAAAAGCTGAGCGTGTA |
| | CCAAGTGATGAACGCCCGCGACGGAAGAGTGGCCG |
| | CCAACATGGAATTTCAGGCCATCGACAGCTTTCTG |
| | CCCACCTCCAGAGTGCTGGAAAGAGTGGAAATCGA |
| | CCACACACCTCTGGACCTGATTCTGCTGGATGACG |
| | AGCTGCTCCTGCCTCTGGGTAGACCTTCTCTGACA |
| | CTGCTGATCGACGTGTACAGCCACTGCGCCGTGGG |
| | CTTTAACCTGTGCTTTACCCAGCCTGGCTACGAGA |
| | GCGTCAGATGTGCCCTGCTGCACTCTCTCGTGCGG |
| | AAGGACTATGTGCAAGAGCAGTACCCCTGCATCGA |
| | GAATAGCTGGATCAGCTACGGCAAGCCCGAGACAC |
| | TGGTGGTGGATAACGGCGCCGAGTTTTGGTCCTCT |
| | AGCCTGGAACACGCCTGCCTGGAACTGGGCATCAA |
| | CACCCAGTACAACCCTGTGCGGAAGCCCTGGCTGA |
| | AGCCTCTGATCGAGAGAATGTTCGGAACAATCAAC |
| | CGGAAGTTCCTCGAGTCTATCCCCGGCAAGACCTT |
| | CAGCAACATCCTGGACAAGGCCGACTACAACCCTC |
| | AGAAAGACGCCGTGATGCGGTTCAGCGTGTTCCTG |
| | GAAATCTTCCACCACTGGCTGCTCGATGTGTACCA |
| | CTACGAGCCCGACAGCCGGTACAGATACGTTCCAG |
| | CTCTGGCCTGGAAGTACGGCTGCAAGGTTTACCCT |
| | CCTGCCACCATCGAGAAGAATGAGCTGAAGAAGCT |
| | GGAAATCATCCTGAGCATCAGCCTGCGGCGGCTGC |
| | ATAGAAGAGGCGGAATCCATCTGCATCACCTGAGA |
| | TACGACTCCAAAGAGCTGTCTGCCCTGCGGATGCA |
| | GTACTCCCTGGAAGAGAAGGGCAAGAAAAAGGTGC |
| | TGGTCAAGCTGAACCCCGCCGACATGAGCTACATC |
| | TACGTGTACATCGACAAGATCAAGTCCTACATCCG |
| | GGTGCCATGCGTGGACCCCTGCAAGTACACACAGA |
| | ACCTGAGCCTGCAGCAGCACCTGATCAACCTGCGG |
| | TTCCACCGGGACTTCATCAACGAGAACATCAACCT |
| | GGACAGCCTGAGCAAGGCCCGGATCTACATCTCCG |
| | AGAGAATCCAGGGCGAAATCGACAACGTGCGGCAG |
| | TACGCCAAGCGGAGCAGCAAGAAAGGCATGAAGAA |
| | GATCGCCAGCCATCAGGGCGTGACCAGCCAGAACA |
| | AGAAAACAATCGCCAGCGACACCATTCACTTCCCC |
| | GCTCAGAAGGGAAAGAACCGGGACACCCACACACT |
| | GCCCGACGACTGGGATGACTTCACCAGCGACCTGG |
| | AACCTTTCTGA |
| | (SEQ ID NO: 408) |
| tnsC | ATGAAGCTGAGCAGCCTGAAAGAGGAAAAGCTGAT |
| | CTCCTTCATCAACTGCTTCGTCGAGACACCCTTCC |
| | TGAACGAGATCGAGAAGGACTTCGACCGGCTGCGG |
| | TACAACAGATTTCTCGGCGGAGAGCCCCAGTGCAT |
| | GCTGCTGACAGGCGATACCGGAACCGGCAAGACCT |
| | TTCTGCTGCACCACTACATGAGCAAGTACCCCGCT |
| | CAGAACGGCAGCGGCTACCTGAGAAAACCCCTGCT |
| | GGTGTCTCGGATCCCCAGCAAGCCTAGCCTGGAAA |
| | GCACAATGGTGGAACTGCTGAAGGACCTCGGCCAG |
| | TGGGGCAGCAACTACAGAAGAAACAGAAGCAGCGC |
| | CGAGAACCTGACCGAGAGCCTGATCAAGTGCATGA |
| | TGAGATGCGAGACAGAGCTGATCCTGATCGACGAG |
| | TTCCAAGAGCTGATTGAGAACAAGACCAGAGAGCG |
| | GCGGAACCAGATCGCCAACCGGCTGAAGTACATCA |
| | GCGAGACAGCCAGAATTCCCATCGTGCTCGTGGGA |
| | ATGCCTTGGGCCGCCAAGATCTCTGAGGAACCTCA |
| | GTGGTCCAGCAGGCTGCTGATCAGAAAGACAATCC |
| | CCTACTTCAAGCTGACCGACGGCCTGAGCATCTTC |
| | GTGCGCGTGATCAAGGGATTCGCCGCCAGAATGCC |
| | CTTCAGAAAGCCTCCTGAGATCGAGGGCAAGCACA |
| | CCATCCTGGGCCTGTACTCTGCTAGCCAGGGCAGA |
| | ATGCGGACCCTGAAGTTCCTGCTGAACGAGGCCGT |
| | GAAGCAGGCCCTGAGCGAGGATTCTGAGACACTGA |
| | CACACGAGCACATCGGCAAGGCCTTCCACATCTTC |
| | TACCCCGAGCACGAGAACCCCTTCTACATCCCTCT |
| | GGAAAACATCAAGATCTACGAAGTGCGCGAGTACT |
| | CCGGCTATGAGATCGACGGCGCTGGCAAAGAGGAT |
| | CGGCTGATTCCTCAGCAGCTGACAGACAGGATCCC |
| | CATCAACCAGCTGCTCCGGAAGTGA |
| | (SEQ ID NO: 409) |
| tnsD | ATGCACTTCCTGATCAGACCCGAGCCTGTGTGCGA |
| | CGAGAGCCTGGAAAGCTACCTGCTGAGACTGAGCC |
| | AGGACAACGGCTTCGAGCACTACAGAATCCTGAGC |
| | GGCAGCCTGAAAGAGCGGCTGCTGCAGTCTGATTA |
| | TGAGGCCGCTGGCGCCTTTCCTCTGGAACTGGCCA |
| | AAGTGAACATCTTCCACGCCAGCTACAGCTCCTAC |
| | CTGCGGATCAGAGCCCTGTGCCTGATCGCCGATCT |
| | GACAGGACAGCCCCACACCAACCTGCTGAAAGTGA |
| | CCCTGATGCACAGCACCGTGACCTTCGGCAGAGGA |
| | CACAAGGCCGTGTCCAGAGACAACACACACATCCC |
| | TCTGTGCTTTATCCGGACCAACAGCATCCCTTGCT |
| | GCCCTGAGTGTCTGGCCGAGCATGGCTACGTTAGA |
| | CAGCTGTGGCACTACAAGCCCTACACCGCCTGCCA |
| | CCGGCACAGAAGAAAGCTGCTGACAAGATGCCCTG |
| | CCTGCCACGAGTCCCTGAACTACCTGTACAGCGAA |
| | CTGCTGACCCACTGCAGCTGCGGCTACGATCTGAG |
| | ACAGGCCTTCACACCTCCTACCAGCAGCGACGATC |
| | TGCAGCTGAGCAGCATGGTGTCCGACGACAAGTGC |
| | GAAGCCCTGTCTCCTGCTAGCGCCAGCCAGGATAA |
| | GAGCCTGAGATATGGCGCCCTGCTGTGGTTCATCA |
| | TGAGATACGGCGAGAGCAGCAACAACGAGGAAGGC |
| | ATGCTGAGCGCCATGCACTACTTCAGAGCCTGGCC |
| | AGACAACTTCACCGCCGAGCTGCTGGATATGATGG |
| | CTGCCGCCACCATCAAGCAGACCAAGAGCTTCAAC |
| | CACATGAGCCTGACCGACGTGTTCGGCAAGACCCT |
| | GAGCGACTGTCTGTACCTGCCAGCCAGAGACACCC |
| | ACCGGAACTTTATCCTGCACGCCTTTCTGGACTAC |
| | CTGACCAACCTGGTCATGGAAAACCCCAGGTCCAA |
| | TATCGCCAATCCTGGCGACCTGCTGCTGAGCATTA |
| | GAGATGCCGCCTGTCTGCTGTCCACCAGCAATGCC |
| | CAGGTGTACAGACTGCTGGACGACGGCTTTCTGAA |
| | GGTGGCCATCAGACCTAGAGCCGGCATGAAAGTGA |
| | AGATCAGCACCCCTGTGCTGCATCTGCGGCAAGTG |
| | ATCGAGTTCCGGCTGACTCACATCCCCGGACCTCA |
| | CGATAAGGGCCACACATACCTGTCCGCCAGATGA |
| | (SEQ ID NO: |
| | 410) |

[0119] 168540|5|GCA_003350295.1_ASM335029v1_genomic|QLYY01000006.1|32744 7|Vibrio (ID: 125)

TABLE 35

| Elements | Sequences |
|---|---|
| tnsA | ATGTTCGACCAGACCAAGAAAAGCAGCCACGTGCA |
| | CAACATCTGCAAGTTCATGAGCCTGAAGAACGACG |
| | CCGTCGTGCGGACACTGTCTATCCTGGAATTCGAC |
| | TTCTGCTTCCACCTCGAGTACAACGTGGACGTGGA |
| | AAGCTTCATCAGCCAGCCTACCGGCTTCTACTACA |
| | AGTTCAACCAGCGGCAGTGCCGGTACACCCCTGAC |
| | TTTCTGGCCATCGATCAGAACAAGCAGAGCACCTT |
| | CTTCGAAGTGAAGCACAGCAGCCAGATCCTGAAGC |
| | CTGACTTCCGGGCCAGATTCAAAGAAAAACAGAAC |
| | GTGACCCTGCAAGAGTTCGACCGGCGGCTGATCCT |
| | GGTCACCGAGAAGCAGATTAGACTGGGCCCCGTGC |
| | TGACCAACCTGAAGCTGCTGCACAGATACAGCGGC |
| | ATGCGGACCATCACCAAGTTCCAGAAACAGGTGCT |
| | GGCCTACGTGCAAGGCAAAGGCATGGTCAAGCTGC |
| | AAGAGATCGCCCACTACTTCGAGCTGAGCGAGGCC |
| | GAAACACTGGTGGCTACACTGCCTTGGGTGTCCTC |
| | TGGACACGTGCAGACCGATTACAAGAGCGCCGGCT |
| | TTGGCCTGGACACCTACGTGTGGTGTTGA |
| | (SEQ ID NO: 411) |
| tnsB | ATGTCTAGCCAGGCCGCCTCTATCCTGGGCTTCTT |
| | CGACGAGTTTGAGAAGGCCGAGAAGGACAGCCAGC |
| | AGAGCAGCCTGGAATTCTTCGAGGAAAGCCCCGAG |
| | ATCAACCTGGCCATCGACGGCTACTGTGACGAAGT |
| | GCGGAAAGAGCTGATCCGGCGGCTGAAGGTGTTCA |
| | ACTACGTGGAAAAGCGGCTGAGAGGCGGCTGGACC |
| | GAGAAGAACCTGGAACCTATCCTGAGCAGCGTGGA |
| | AAGCGACCTGGAACTGCCTGCTCCTAAGTGGCGGA |
| | CACTCGTGTGCTGGAAGAAGATCTACCTGGAAAGC |
| | GGCAGGGACCCCTACTCTCTGATCCCCAAGCACCT |
| | CCTGAAGGGCAACCGCGAGAAAGTGATCGACAGCC |
| | AAGTGATCGTGGACGAGGCCATCACCAAGGTGTAC |
| | CTGACCAGAGAAAGACTGAGCGTGGCCGAGGCCTA |
| | CCGGTACTATACAGCTAGAGTGGTGCAGCTGAATC |
| | GGTTCATCATCGAGGGCAAGATCAAGCCCGTGTCC |
| | GAGCGGACCTTCTACAACCGGATCAAGGACCTGCC |
| | TCCTTACGAAGTGGACGTGGCCAGATTCGGCAAGA |
| | GATACGCCGACAGACAGTACAGAGCCGTGGGCCAG |
| | CAGATCATTGCCACCAAGCCTATGGAATACGTCGA |
| | GATCGATCACACCCCTGTGCCTGTGATCCTGATCG |
| | ACGACGAGCTGGACATCCCTCTGGGCAGACCCTAC |
| | CTGACAATGCTGTACGACCGGTTCAGCAAGTGCAT |
| | TGTGGGCCTGAGCGTGAACTTCAGAGAGCCCAGCT |
| | TTGACAGCGTGCGGAAGGCCCTGCTGAACAGCCTG |
| | CTGGATAAGAGCTGGATCAGACAGAAATACCCCAT |
| | GATCAAGAACGACTGGCCCTGCCACGGCAAGATCG |
| | ATTGCCTGGTGGTGGATAACGGCGCCGAGTTCTGG |
| | TCTAAGAGCCTGGAAGATAGCCTGCGGCCTCTGGT |
| | GTCCGACATCCAGTATTCTCAGGCCGCCAAGCCTT |
| | GGAGAAAGAGCGGCATCGAGAAGCTGTTCGACCAG |
| | CTGAACAAGGGCCTGAACAACGCCTTTCCTGGCAA |
| | GACCTTCACAAACCCCACACAGCTGCACGACTACG |
| | ACCCCAAGAAAGACGCCGTCGTCAGAGTGTCCGTG |
| | TTCCTCGAGCTGCTGCACATCTGGGTCGTCGACTT |
| | CTACCACATGAAGTCCGACAGCAGAGAGCGGGCTA |
| | TCCCCTACCACAAGTGGCAGCAGTCTCAGTGGGTG |
| | CCCAGCCACTATGATGGCGAGGAAGCCGAGAAACT |
| | GAAGGTGGAACTGGGCCTGCTGCGGCACAGATCTA |
| | TCGGAATCGCCGGCATCAGACTGCACAACCTGAGA |
| | TACCAGAGCAACGAGCTGATCGAGTACCGGAAGTA |
| | CCACAGCACCAAGAGCAATGAGAAACTGTTCGTGC |
| | GGACCAAGACAGACCCCAGCGACATCTCTCACATC |
| | CATGTGTATCTGGAACCCCAGAAAAAGTACATCAA |
| | GGTGCCCGCCGTGGACAACAGCGGCTATACAAAGG |
| | GCCTGTCTCTGTTCGAGCACGAGCGGATCCAGAAG |
| | GTGCTGCGGCTGAACACAAGAGAGCTGGCCAACGA |
| | AGAGGCCCTGGCCGACACCTTTATGTACATGAAGA |
| | ACCGGATCCAGGGCGAGACAGACAGACTGTCCGCC |
| | AGCAAGAAGAAGAAGCCTCGGCTGCCCAAGACCAG |
| | CAACACCAGCAAACTGGCCAAGTTCCAGGACGTGG |
| | GCAGCGACGGCCCTAATAGCATCACCACCAAGATC |
| | AACGAGGGCCCCGTGGTCATGGACTGCCTGGATGA |
| | TACCCAGCTGATTGACGATGACTTCGAGAACGTGG |
| | AAGGCTACTGA |
| | (SEQ ID NO: 412) |
| tnsC | ATGAACCTGACCAGCTGCCAGATCGAGCGGCTGAA |
| | GGCCTTTGAGACATGCTTCATCGAGTACCCCGCCA |
| | TCACCGAGATCTACAGCATCTTCGACCAGCTGAGG |
| | TTCAATCAGACCCTCGGCGGAGAGCCTGAGAGCTT |
| | TCTGCTTACTGGCGAGGCCGGCTCTGGAAAGACAG |
| | CCCTGATCAAGAACTACCTGAGCAGATTCGACGTG |
| | GGCAGCACCTGGGATAGACAGCCTGTGCTGAGCAC |
| | CAGAGTGCCCAGCAGAATCAACGAGCAGAACATGC |
| | TGAGCCAGTTCTGCGTGGACCTGAACGTGAAGCTC |
| | GGCGGCAGAAGCTCTAGACAGAGAGGCGGAATTGC |
| | CCTGGGCGAAGCCCTTGTGAAGCAGCTGAAGAGAA |
| | AGAGCGTGGAACTGATCATCGTGAACGAGATCCAA |
| | GAGCTGGTGGAATTCAGCACAGCCCAAGAGCGGCA |
| | GACAATCGCCAACACACTGAAGTACATCAGCGAGG |
| | AAGCCAGCCTGAGCTTCGTGCTCGTGGGAATGCCT |
| | TACGCCGAAGTGATCGTGAATGAGCCCCAGTGGAA |
| | CAGCAGACTGAGCTGGCGGAGAAAGATCGACTACT |
| | TCAAGCTGCTGAAAGTGAACCAGAGCATGAAGTCT |
| | GCCCCTCGGTACAGCTTCGACCTGGAACAGAAGAA |
| | GCACTTCGCCAGATTCGTGGCCGGCCTGGCCATGA |
| | GAATGGGCTTTGAGGAACCTCCTAAGCTGGCCAAG |
| | AACGAGACACTGTTCCCTCTGTTCGTGGCCTGCAG |
| | AGGCGAGTGCAGACGGCTGAAGCACTTTCTGAAGG |
| | ACGCCCTGGTCATGAGCTTCACCATGAAGGCCAAC |
| | ACCATCAACAGAGCCCTGCTGAGCGCCACCTTCAG |
| | CCTGAAGTTTCCCGAGCTGGCTAACCCCTTCGACT |
| | GCCAAGCCGAGGATCTGGACATCCACCAGATCGAA |
| | ACCAGCAGCAGCTACAACCTGCAGGCTACCACCAG |
| | CGAGGACAAGATTCTGGCCCCTAGATTCACCGACG |
| | CCATTCCTCTGAATATGCTGCTGAGCAAGAACGCC |
| | CTGAGAGTGTGA |
| | (SEQ ID NO: 413) |
| tnsD | ATGAACAACGGCATCGAGTACTACGAGGACGAGAG |
| | CCTGGAATCCATGCTGCTGAGACTGTCTCACGCCC |
| | TGGGCTACGAGAGATTCAGCCACTTTGCCGAGGAC |
| | CTGTGGCTGGAAACCGTGGATGAACACGGCGCTAT |
| | CAGCGGCGCCTTTCCATTTGAGCTGACCCATGTGA |
| | ACGTGTACCACGCTCAGACCACCAGCCAGATGAGA |
| | GTCAGAGTGCTGCTGGCCCTGGAAAAGAAGCTGAA |
| | GCTGAGCAGCCTGGGCATCCTGAGATTTGCCCTGA |
| | GCCACAGCAAGGCCCAGTTCAGCCCTGATTACAAG |
| | GCCGTGCACAGATTCGGCAGCGACTACCCTTACGC |
| | CTTCCTGCGGAAGCGGTTTACCCCTATCTGCCCTC |
| | TGTGCATCAGCGACACCCCTTACATCAGACAGCAG |
| | TGGCAGTTCATCAGCCACCAGGCCTGTGAACACCA |
| | CGGCTGCAAACTGGTGCATCAGTGCCCTGAGTGCC |
| | AGAGCAAGCTGGAATACCAGATCACCGAGAGCATC |
| | AACCAGTGCGAGTGCGGCTTCGAGCTGAGAAACTC |
| | TCCTGTGGAAGGCGCCCCTGAGGCCGCTCTTATAG |
| | TTGCCAGATGGCTGAGCGGCTCCGACCTGAAGTCT |
| | CTGGGCAGCCTGAAAGAAGAGATGACCCTGAGCGA |
| | GAGATACGGCTTCCTGCTTTGGTACGTGAACAGAT |
| | ACGGCGACATCGACGACCTGAGCTTCGAGAGCTTC |
| | GTGGCCTACTGCTGCAGCTGGCCTACACTGCTGTG |
| | GCAGGATCTGGACGTGCTGAAAGAAAAGGCCAAGC |
| | TGGTGCAAGTGAAAGAATGGAACAAGGTGTTCTTC |
| | CACGAGGTGTTCGGCACCCTGCTGAAGGACTGTAG |
| | ACAGCTGCCTAGCAGACAGCTGAGCCAGAACAACG |
| | TGCTGACACAGGTGCTGGCCTATTTCACCGAGCTG |
| | ATGACAGCCGTGCCAAGCAGCACCAAGGGCAACTT |
| | CGGCAATATCCTGCTGAGCCCTCTGGAAGTGTCCA |
| | CACTGCTGAGCTGCACCACCGACGAGGTGTACAGA |
| | CTGTACGAGTTCGGCGAGATCAAGGCCGCCATCAG |
| | ACCCAGAATGCACACCAAGATCGCCAGCCACGAGA |
| | GCGCCTTCACACTGAGAAGCGTGATCGAGACAAAG |
| | ATCGCCCGGATGAGCAGCGAGTCCGATGGCCTGTC |
| | TGTGTACCTGCCTGAGTGGTGA |
| | (SEQ ID NO: 414) |

[0120] 175302|73|GCA_003585365.1_ASM358536v1_genomic|NOJ101000009.1|14946 1|Vibrio (ID: 126)

TABLE 36

| Elements | Sequences |
|---|---|
| tnsA | ATGTCTGCCCTGCCTTCTCCTAGCACCACCACACTGATCGCCCTGGAAAGCGCCTTTGTGACCCCTGCCAGAAACCTG |
| | ACCAAGAGCCGGGGCAAGAACATCCACAGATACGTGTCCGCCAAGATGGGCAAGCGCGTGACCGTGGAAAGCTTCC |
| | TGGAATGCGTGGCCTGCTACCACTTCGACTTCGAGCCTAGCATCGTGCGGTTCTGCAGCCAGCCTATCAGATTCAGCT |
| | ACGGCCTGAACGGCAAGACCCATACCTACGTGCCCGACTTCCTGGTGCAGTTCGATACCGGCGAGTTCAAGCTGTAC |
| | GAAGTGAAGTCCGACATGGAAAGCAGCAAAGAGGAATTCCAGTGCGAGTGGGAAGCCAAGGTGCAGGGCGCCTTTG |
| | AACTGGGACTCGAGCTGGAACTGGTCACCGAGGAAGAGATCCTGGACGAAGTGATCTTCAGCAACCTGAAGCTGCTG |
| | CACCGCTACGCCAGCAGAGACAACCTGAACCACTTCCACCAGACACTGCTGGCCACCTTCAAGCTGAATGGCACCCA |
| | GACAGCCAAGTCTCTGGGACACCACCTGGGCCTGAATGGCCGGAAGATCCTGCCTTTCCTGTGCGACCTGCTGAGCC |
| | GGAATCTGCTGCAGACAAGCCTGGAAACCCCTCTGTCTCTGGAATCCGAGTTCGAGCTGGGCTGCTACGCTTGA |
| | (SEQ ID NO: 415) |
| tnsB | ATGCCCAACAAGAGCTTCAGCAGCTTCCACAGAAAGAGCGCCTTCCAGCAAGAGAAGCTGGAACCCAACGACAGAG |
| | TGGTGGACGACAACGATGTGGACGAGGCCACCTACCAGGACATCAGCGCCTTTCCAGACAATATCGCCACACAGATC |
| | ACCTTCCGGCTGAGCATCCTGAGATACCTGGCCAGCAAGTGCGAGCGGATCATCCCCAAGACAATCGAGCCTCACAG |
| | AGTGGGCCTGCAGAGACTGCACGACAGAAAGATCCCTAGCGCCATCAGCATCTACCGGTGGTGGCTGGTGTTTAGAG |
| | CCAGCGGCTGCAACCCTGTGTCTCTGGCCCCTAAGAACAAGAACAAGGGCAACAGCAAGGCCAAGGTGCCCACCTTT |
| | GTGGACGCCCTGATGGAACAGGCCGTGGACAGAGTGATCAGCGGCCGGAAAGTGCGGATCAGATCTGCCTACAGAA |
| | GAGTGCGGCGGAAGCTGAGACAGCACAACCTGAACAACGGCACCAAGTACAAGTACCCCACCTACGAGAGCCTGCG |
| | CAAGAGAGTGAAGAAGAAAACCCCTTTCGAGCTGCTGGCCGCCAAGAAAGGCGAGAGAGTGGCCAAGCGCGAGTTC |
| | AGAAGAATGGGCAAGAAGATCCTGACCAGCTACGTGCTGGAACGCGTGGAAATCGACCACACCGTGGTGGATCTGTT |
| | CGCCGTGCACGAGGAACACAGAGTGCCTCTTGGTAGACCCTGGCTGACCCAGCTGGTGGACTGTTACTCTAAGGCCG |
| | TGATCGGCTTCTACCTGGGCTTCGAGCCTCCTAGCTACGTGTCAGTCAGCCTGGCTCTGAAGAACGCCATCCTGAGGA |
| | AGGACGACCTGCTGAGCAGCTTCGACTCCGTGGAAAACGAGTGGCTGTGCTACGGCATCCCCGATCTGCTGGTCACC |
| | GACAACGGCAAAGAGTTCCTGAGCAAGGCCTTCGACAAGGCCTGCGAGTCCCTGCTGATCAACGTGCACCAGAACAG |
| | AGTGGAAACCCCTGACGACAAGCCCCACGTGGAAAGAAGCTACGGCACCATCAATACCAGCCTGCTGGACGATCTGC |
| | CCGGAAAGGCCTTCAGCCAGTATCTGCAGAGAGAAGGCTACGACAGCGTGGGCGAAGCCACACTGACACTGGACGA |
| | GATCAAAGAGATCTACCTGATCTGGCTGGTCGACATCTATCACCCCAAGAGCAACCAGCGGGGCACCAACTGTCCTA |
| | ACGTGGCATGGAAGAGGGGCTGCCAAGAGTGGGAGCCCGAGGAATTCAACGGCAGCAAGGACGAGCTGGACTTCAA |
| | GTTCGCCATCGTGGACCAGAAGCAGCTGACAAAGGCTGGCGTGACCGTGTACAAAGAGCTGACCTACAGCAGCGAG |
| | AGGCTGGCCGAGTACAGAGGCAAAAAGGGCAACCACAAGGTGCAGTTCAAGTACAACCCCGAGTGCATGGCCGTGA |
| | TTTGGGTGCTCGACGAGGACCTGAACGAGTACTTTACCGTGCACGCCATCGACTACGAGTACGCCAGCAGAGTGTCT |
| | CTGTGGCAGCACAAGTACAATATGAAGTACCAGGCCGAGCTGAACAGCGCCGAGTACGATGAGGACAAAGAGATTG |
| | ACGCCGAGATCAAGATCGAGGAAATCGCCGACCGGTCCATCGTCAAGACAAAGAAGATCAGGGCCAGAAGAAGAGG |
| | CGCCAGACACCAAGAGAATAGCGCCAGAGCCAAGAGCATCAGCGACGCCAAACCTGTGCCTAGCCAGAAGCACGAG |
| | GACGAGATTGTGATCGTGGACAACGAGGACTGGGACATCGATTACGTGTGA (SEQ ID NO: 416) |
| tnsC | ATGAACGAGACAAGAGAGGCCCGGATCAGCAAGGCCAAGAGGGCCTTTGTGTCTACCCCTAGCGTGACCAAGATCCT |
| | GTGCTACATGGACCGGTGCAGGGACCTGAGCGACTTCGATTCTGAGCCTACCTGCATGATGGTGTACGGCGCTTCTGG |
| | CGTGGGCAAGACCACCATCATCAAGAAGTACCTGAACCAGAACCGGGGGACTCTGAAGTCGGCGGCGATATCATTC |
| | CCGTGCTGCACATCGAGCTGCCCGACAATGCCAAGCCTGTTGACGCCGCTAGAGAACTGCTGGTGGAAATGGGCGAT |
| | GCTGATTATCATCGACGAGTTCCAGCACCTGGTGGAAGAACGGTCCAACCGGGTGCTGACCCAAGTCGGCAATTGGC |
| | CCCCTGGCTCTGTACGAGACAGACCTGGCCAGACTGACCAAGAAGCTGATCGATCTGATCCCCGTCGTGGGCGTGAA |
| | GCTGATTATCATCGACGAGTTCCAGCACCTGGTGGAAGAACGGTCCAACCGGGTGCTGACCCAAGTCGGCAATTGGC |
| | TGAAGATGATCCTGAACAAGACCAAGTGTCCCATCGTGCTGTTCGGCATGCCCTACAGCAAAGTGGTGCTGCAGGCC |
| | AACTCTCAGCTGCACGGCAGATTCAGCATCCAGTTCGAGCTGCGGCCCTTCAGCTATCAAGGCGGAGAGGGCGTGTT |
| | CAAGACCTTCCTGGAATACCTGGACAAGGCCCTGCCTTTCGAGAAGCAGGCCGGACTGGCCAATGAGAGCCTGCAGA |
| | AGAAGCTGTACGCCTTCAGCCAGGGCAACATGCGGAGCCTGAGAAACCTGATCTACCAGGCCAGCATCGAGGCCATC |
| | GACAATCAGCACGCCACCATCACCGAAGAGGACTTCGTGTTCGCCAGCAAGCTGACCAGCGGCGACAAGCCTATCAC |
| | CTGGAAGAACCCCTTCGACGAGGGCGTGAAAGTGACCGAGGATATGCTGCGGCCTCCTCCAAAGGATATCGGCTGGG |
| | AAGATTACTACCACAACGTGAAGCCCAAGAACCAGCGGAGAAAGGGCAGCAACATGTTCGAGTGA |
| | (SEQ ID NO: 417) |
| tnsD | ATGCAGGTTTCCGGCATCCTGATGAAGACCATGCTGCTGCAGCGGCCCAAGCCTTTCGAGGATGAGAGCCTGGAAAG |
| | CTACCTGATCAGAATCGCCAACCGGAACGGCTACCAGGACGTGGACAGATTTCTGAGCGCCCTGAAGCACTACCTGT |
| | GCGACGGCGATAGCGAGAAGTTCAGCAGCTTCCCCACCGACATCAGACGGATCAACCCCTACAGCAGCAAGCACAG |
| | CTCTGCCGCCAGATCTCACGCCCTGCACAAGATCGGACAGCTGACCTTTACCGAGAGCGTGGACCTGCTGAAGCTGG |
| | CTATCAACAGAAGCCCTCTGAAGTACAGCCCCAGCGTGACCGCCGTGATTAGAGGCCATGAGGTGTTCCCCAGAAGC |
| | CTGCTGCGGACCAACATCATCCCTGTGTGCCCCGTGTGCCTGCAAGAGAATGGCTACGCCAGCTACCTGTGGCACTTC |
| | GAGGGCTACGACTACTGCCACATCCACGATCTGGCCCTGACCTACAATTGCCAGTGCGGCAAGCCCTGCGACTACAG |
| | AGTTTCTGGACTGCAGCTCGTGTGCAGCTCCTGCGGCACAACACTGACCCATCTGCTGGAAAAGCCCACCGATCGGA |
| | GCAGCGATATCTCTCATTGGCTGGCCGGCGAGACAATCAAGTGGCTTCCTGCTGTGCCCGTGTCCTACAGATGGGGAC |
| | TTGTGCACTGGTGGATGAACAACAAGAAGTCCAAAGAGCTGGAAACCGAGAGCTTCACCATCTTTTGGAAGAACTGG |
| | CCCAACAGCTTCCACAACCTGATCCAAGAGACACTGAGCTACAACCAGACCTACAGCCTGGTGGCCCCTACACAGTG |
| | GCGGCTGAAAGATCTGCTGGGCGAGATCCTGTTCAGCTCCATCAACCTGCCTGGCCGCAACCTGCAGTACAATCTGAT |
| | CCTGAGAGAGCTGTTCCACTACCTGGAAAACCACCTGTGGGAGAACAACGGCCTGATCGCCAATCTGAGACTGAGCG |
| | CCTTTGAGGTGTCCCTGATCCTGGGCTGTAGCACCGAAGAGGTGGCCAGCATGTCTGAGCAGGGACTGCTGATCCCC |
| | ATCCAGAACCGGAAGAGATACGAGCCCATGAGCCTGACCAACTGCATCTTCCACTTCGGCGACGTGTTCTGCATCTG |
| | GCTGGCTGAGTTCCAGACCGACGAGTTCAACCGGTCCTTCTACACCAGCCGGTGGTGA (SEQ ID NO: 418) |

[0121] 183477|22|GCA_900099955.1_IMG-taxon_2619618960_annotated_assembly_genomic|FNEF01000006.1|191976|Halomonas (ID: 127)

TABLE 37

| Elements | Sequences |
|---|---|
| tnsA | ATGTACACCAGAACACTGCGGCCCTCTCCAGTGAAGCACATCTACAAGTTCGCCAGCCACAAGAACGGCAACGTGCA |
| | GACCGTGGAAAGCAGCCTGGAATTCAACGCCTGCTTCCACTTCGAGTACGCCAACGAAGTGCGGAGCTTTGTGGCCC |
| | AGCCTGAGGGCTTCTACTACCAGTTCGAGGACCGGACCTGCAGCTACACCCCTGACTTCGAGCTGTTCTGCCACAGCG |
| | GCAAGAAAGTGTTCGTGGAAATCAAGCCTCCTCCAGAGGCTCTGAAGCACGACTTCATCCAGCGGTTCACCGCCAAG |
| | AAAAAGGCCGTGGAAATGCTGGGCAAAGAGCTGATCCTGGTCACCGACCACCAGATCAGCAGCATGCCCAAGCTGA |
| | AGAACCTGAAGCTGATCAACAGATACGCCGGCCTGTACACCGAGGTGGTGTCCCGGAAGAAGATCTACGAGCTGATT |
| | AAGAAGTCCCACGGCCTGTCTATCGCCGACATCTCTGAACTGTGTGGCGCCGATTCTGCCGAGGTGCTGGTGGATGTT |
| | ATGTGGCTGGTGGCCTCTGGCAAGGTGCTGATCAATATCGACGAGACATTCGGCTGCGAGAGCCTGATCTGGGTTGG |
| | AGGCGGACAGTAA (SEQ ID NO: 419) |
| tnsB | ATGAGCATCGAGTTCTTCAGCGACGAGTTCCCCGGCTTTCAGTCTGGCGAAGCTTCTGCCGTGGTGGACGGCCAGTAC |
| | ATCAATGTGCCTGAGCGGCTGAGCTACATCAGCTTCGACAGCCTGAGCAAGAGCGTGCAAGAGGAAGCCTACTACAA |
| | GTACAAAGTGATCGTGCTGGTCAAAGAGCATCTGCAAGGCGGCTGGACCAAGAAGAACATCGACCCCATCCTGGACA |
| | GCCTGTTCGAGCAGGGACACATCGAGAAGAAGCCTAGCTGGCGCTCTGTGGCCAGATGGCACAAGAACTACGACCA |
| | AGTGATCGGCCCCAAGAGCCTGGTGTCTGCCAAAGGCCTGGTCAAGAACCCCGGCAACAGCAAGAGAGATGACGCC |
| | GACTTCTACAAGAGAGCCGTGGAAGAGAAGTTCCTGAAGCGCGAGAGGCCTCACGTGTCCACCGCCTACTACCACTA |
| | CTTCAACAACATCCTGCTGTACAACCGGGCTCACCCCGACAATGCCATCGAGCCTATCACCAAGAGCGCCTTTTACAA |
| | GCGCGTGAAGAAGATCAGCCCCTACGAGGTGGAAGTGGGCAGATTTGGAAAGGCCGAGGCCGACAAGGACTACCGG |
| | GTCGTGAACAAGTTTTCTGCCGCCGAGCGCGTGATGGAAAGAGTGGAAATCGATCACACCCCTCTGGACCTGATCCT |
| | GCTGGACGATACCCTGCTGATCCCCATCGGCAGACCCTACCTGACCATCCTGATCGACTGCCACAGCCGGTGCATCAT |
| | CGGCTTCTACCTGAGCTTCCAAGAGCCAAGCTACAACAGCGTGCGGAGCGCCATCATGAATGCCTGCCTGTCCAAAG |
| | AAGATGTGGCCAAGAAATACCCCATGATCAAGAAGAATTGGCCCTGCCAGGGCAAGATCGAGACACTGGTGGTGGA |
| | TAACGGCGCCGAGTTCTGGTCCAAGAATCTGGAATTCTTCTGCGCCAGCGTGGGCATCAATATCGAGTTCAACCCCGT |
| | GGGCAAGCCCTGGAAGAAACCCCTGGTGGAACGGCTGTTCAGCATCTACAACTCCCGCTTCGTGAAAGAGATCCCCG |
| | GCACCACCTTCAGCAATGCCCAACAGCTGGCCGGCTACAAGCCTGAGAAGGATGCCATCCTGCCTTTCAGCTACTTCA |
| | TCGAGCTGATGCACATCTGGATCATCGACATCTACAATCAGAGCCCCGACAGCCGGATGACAAGAATCCCTGCTCTG |
| | AGCTGGGAGATCGGCTGCAAGAAGTACCCTCCACCTCTGTACAGCGGCTTCGAGGAAAAGATCTTCAAGATTGAGGC |
| | TTTCCCCACCGAGCTGTGCACCCTGAGAAGAGGCGGCATCTCCATCGACCGGATCGACTACACCAACGAGGAACTGG |
| | TGGAATACCGGAAGATCACCCCACCTCCACCTGGCAGCAAGGTGGTCAAAGTGGTGGTCAAGAGGGACCCCGAGGA |
| | CGTGTCCTACATCTACGTGTACCTGGTCGAGCGGAAAGAGTACATCAGAGTCCCCGCCGTGGATCCCGACAGACTGT |
| | ATGATGGCCTGAGCGTGTTCCAGCTGAAAGTGCGGCGGAAGCTGCGGAGAAACTTCATCAACTCCAAGACCGACTAC |
| | GTGGGAATCGCCGAAGCCGAGAAGCTGATCGACGACAGAGTGTCCGAGATCGCCGAGGAAGTGTCTGCCTCCAAGA |
| | AAAAGATCAAGGGCACCAAGAAGGCCGCTGCCTACTTCGGCATCAGCAGCGAGAATCCCAGCAGCATCGTGGACGG |
| | CTTCACCAGCAGAGAGATCAGCGATATCGAGAAAGAGAACAAGAGCCACAGCGGCGTGAACCCCAACGACGAGGAA |
| | TGGAAGCGGATCTCCGACGACCTGGAACCTTACAGCTGA (SEQ ID NO: 420) |
| tnsC | ATGAACATGCTGATGAGCAACGAGAAGCTCGAGCAGCAGATCTACTTCAAGAACTGCTACGTGAAGCACAGCAGCGT |
| | GGCCAGAGCCATCAGCAGCCTGGAAATCCTGAAGGCCAATCACGCCCTCGGCGGAGAGCAACAGTGCATGCTGATCA |
| | TCGGCGATCCTGGCAGCGGCAAGAGCAGACTGGTGCAAGAGTTCCAGTCTCAGTACCCCGAGTACGTGGAAAACGAC |
| | GGACCTGGGCCAGTTTGGCGCCGACACCAGAAGAGAGAGAAGAAGAGAGGCCGGACTGGCCGAGGCTCTGGTCAAG |
| | ACCGTGATCAAGCCCGTGCTGGTGTCTAGAATCCCCAGCAAGCCCGACGTGGAATCTATGCTGATCCAGCTGATGAT |
| | GGACCTGGGCCAGTTTGGCGCCGACACCAGAAGAGAGAGAAGAAGAGAGGCCGGACTGGCCGAGGCTCTGGTCAAG |
| | ATGCTGAAGAAATGCAAGAGCGAGATGATCATTATCAACGAGTTCCAAGAGCTGATCGAGTTCAAGTCCGTGGAAGA |
| | GAAGCAGCGGATCGCCAACATCCTGAAGCTCGTGAACGAGAAGGCCGGCATTCCCATCGTGCTTGTGGGCATGCCTT |
| | GGGCCGCTGAGATCCTGAATGAACCTCAGTGGGCCAGCAGACTGATGTGCACCATCGAGCTGCCTTACTTCAAGTTCT |
| | TCAACCTCGAGGACCGGATCGAGTTTACCCGGTTCATCAAAGGCCTGGCCAGCAAGATGGGCTTCAAGAAGGCCCCT |
| | AGCATTCACGTGGACGAGATCCTGTTTCCTCTGTTCAGCGTGACCAGGGGCGAGACACGGCAAGTGAAGAGAGTGCT |
| | GGAAGCCGCTCTGTGTGTGGCCCTGAGCAAGAACGATAGCACCGTGCGGAGACAGCACTTCCTGGAAGCCTGCGATA |
| | AGTTCTTCCTGGGCGCCGATAATCCCTTCGAGCTGGAACTGGAAGATGTGCCCATCAGCGAGGTGTCCAAGTACAGC |
| | AGCTACAACCGGTACAGCACCGTGGAAAGCGAGACATTCGTGGCCACACAGTTCACCCGGAAGATCAGCACCAGAG |
| | AGCTGTTCAGCAAGAACTGA (SEQ ID NO: 421) |
| tnsD | ATGAAGCTGCTCGTGCGGCCCTCTCCATTCATCAACGAGAGCCTGGAAAGCTACATGCTGCGGCTGAGCCAAGAGAA |
| | CTTCTTCGAGTACTACCAGCAGCTGAGCCGGGCCATCAAGGATTGGCTGCAACTGCACGATCACGAGGCCGCTGGTG |
| | CCTTTCCTGAGGAACTGAGCAGACTGAACGTGTACCACGCCGCTCAGAGCAGCAGCAGAAGAATCAGAGCCCTGAAG |
| | CTGGTGGAAAGCCTGACCGACAACGAGAAGCTGCCTCTGCTGCACCTGGCCGTGATCCACAGCAGCGAGAAGTTCTG |
| | CAGCCGGTACACCAGCGTGTTCTACGGCGGAACACACGTGCCAAGAGCACTTGTGCGGCAGAAATCTATCCCTGTGT |
| | GCCCCGATTGTCTGAGCGAGGCCAACTACATCCGGCAAGAGTGGCACTGGATGCCCTACGAGGCCTGCATCAATCAC |
| | GGCAAGCAGATGCTGCACGAGTGCCCCAAGTGCGAGGAAAAGCTGAACTACACCGACAGCGAGTGCCTGCACACCT |
| | GTAGATGCGGCTTCGACCTGAGAAACGCCGATAGCGAGCCTGCCGATGAGTGGCAGCTGATCGCCTCTAGACTGGTT |
| | GTGGGCGAGCACAGCCCTAGCAGACATCCTCTGCTGGACATCAGAAGCGTGTCCCTGAGACTGGCCTGCCTGCTCTG |
| | GTATCAGCTGTACGTGCACAAGACCCTGGACGCCTGCGATCAGGTGTCCACCAGAACAATCGAGCAGGCCATCGAGT |
| | ACTTCACCCACTGGCCTGAGGTGTTCACCAAAGAACTGGAAGAACAGGTGTCCCTGTCCGGCGACAAGCTGATCTGC |
| | GACTACAACAAGACCAGCTTCCGGGACGTGTTCGGCAACATCGTGGGCATCAGTCGGCTGCTGCTGAAGGCTTACCC |
| | CGAGAACGACTTCGTGCTGACCCCTCTGGAAAACTTCCTGGCCAGACTGGTGGACCAGAATCCTCAGACCAGAGTGC |
| | CCAACGTGGCCGACCTGCTGATCTCTATGCCTGAGGCCGCTATCCTGCTGGGCACATCTTATGAGCAGGCCTACCGGC |
| | TGTACGAAGAGGGCTATCTGAAATGCGCCGTGCGGCTGAAGTCCCACGAGAAACTGGTTAACGGCATCGGAGTGTTC |
| | TACCTGCGGGAAGTGATGGAACTGCGGCAGAGCAGAATGCCCATTGAGACAGGCGCCTACAACAACTACCTGCCAGC |
| | CTGGTAA (SEQ ID NO: 422) |

[0122] 186156|32|GCA_900129155.1_IMG-taxon_2582581270_annotated_assembly_genomic|FQVF01000009.1|196850|Marinomonas (ID: 128)

TABLE 38

| Elements | Sequences |
|---|---|
| tnsA | ATGTACAACCGGAACCTGCGGAAGCCCTCTCCAAACAAGAACATCTACAAGTTCGTGTCCCGGAAGAACCGGTCCAC |
| | CATCATGTGTGAAAGCGGCCTGGAATTCGACGCCTGCTTCCACCTGGAATTTTCCCCATTCATTGCCAGCTTCGAGAG |
| | CCAGCCTACCGGCATCGAATATCAGGCCGACAACAAAGTGCGGCGGTACACCCCTGACTTCAAGATCGTGAAGGACA |
| | CCGGCGAGATCGAGTACATCGAGATCAAGCCCGAGCAGATCCACAGCACCCAGAAGTTCCGGGAAGAGTTCGAGTG |
| | CAAGAGGGCCGCCTATAACACCCTGGGCTACAAGCTGATCCTGGTGTCCGAGAAGCAGATCCGGAACGACAACCTGC |
| | TGGCCAACCTGAAGGTGCTGCACAGATACGCCAGCAGCAGCCTGTCTGAGCTGCACAAGCTGGTGCTGCATCACATC |
| | AAGAGCGCCAAGAGCCTGAGCATCCGGCAGCTGGCTAACAAGCTGGACCTGCTGATCGGCGATTGCATTGCCGCCTG |
| | TGCCATGCTGATTGGCATCGGCATGATCAAGGTGGACCTGGAAGTGGAACTGCTGTGCGAGCACAGCCTGCTGAATG |
| | AGGCTTGA (SEQ ID NO: 423) |
| tnsB | ATGTTCGACGACGAGTTCGAGGACCAGATCATCAGCGAGGACACCAGCGACCAGCATCTGCAGACCAACGATCCCAT |
| | CTTCTTCAGCAGCGACCTGGGCAGCTACTCCGAGGACATTAGCCAAGAGGCCACCGCCAAATACGAGCTGGTCATCT |
| | TCCTGCGGAGCAGACTGACAGGCGGCTGGACCCAGAAGAACATCGACCCTCTGTTCGATGAGTACTTCAGCCAGAAC |
| | CGGCTGATCACCATGCCTAGTTGGAGAACAGCCGTGCGGTGGCACAAGAAACTGCTGGAACAGTGTGATGCCCTGGT |
| | GGCCCTGATCGACAGACACGACTGCAAGGGCAACAGAAACAAGAAGCTGCACCTGGACCACGACAACATCATCGAG |
| | GTGCCCAACGACCTGTTCCTGAAGGCCAAGCGGCCTTCTATCGCTGGCGCCTACCGGTACTACAAGGACAAGTGCCT |
| | GCTGCGGGACCAGTCTAAAGGCGGCGGAATCAGACCCATGAGCCAGAGAGCCTTCTACGACCGGATCTACAAGCAG |
| | AACAGCTACGAGATGACCGCCAAGCGGAGAGGCAAGTACAAGGCCGACATGAAGTTCGGCTACAAAGGCGGCATCA |
| | TCAAGCCCGAGCGCGTGATGCAGAGAGTGGAAATCGATCACACCCCTCTGGACATCATCCTGCTGGACGATGGCACC |
| | GGCAAGCCTATCGGCAAGCCATTTCTGACCCTGCTGAAGGACGTGTACAGCGGCTGTCTCGTGGGCTACCACCTGACC |
| | TTTAAGGCCCCTAGCTATGCCTCTGTGGCCAAGGCCATCTGCCACACACTGCTGCCTAAGAGCCAGAGCCAAGAGCT |
| | GTGGGGAATCGAGTGGCCCTGCAACGGAAAGATTGAGGTGCTGGTGGTGGACAACGGCGCCGAGTTTTGGAGCAAG |
| | AGCCTCGAGCAGATGTGCCTGGAACTGGGCATCAACATCCAGTACAACCCCGTGCGACAGCCTTGGCTGAAGCCCTT |
| | CATCGAGCGGAACTTCCGGTCCATCAACGATCTGCTGCTGGATGAGCAGGACGGCAAGACCTTCAGATCCCTGGATG |
| | TGCGGGACGAGTACGACAGCGTGAAAGAAGCCACCATCAAGTTCAGCAACTTCGTGCACGGCTTCGAGAAGTGGATG |
| | GCCGAGGTGTACAACTGCAGCTCCGATAGCAGAGGCCTGAGAGTGCCTAGCCTGCTGTGGCAAGAGGGCTTCGATAA |
| | GCTGCCTCCTGCCAAGCTGAACGAGCAGGATGCCATCGATCTGCCCAAGATCGCCGGCCTGAAGAAAACCAGAACAC |
| | TGCAGCCTAGCGGCATCACCCACGAGCTGCTGAGATACGATTCTGAGGCCCTGAGCGACTACAGAAAGAGCTGTTGG |
| | AGCCCCGACCAGCGGAAGAAAGTGATCATCAAGGTGGACATCGACGACGTGTCCAAGATCTACGTGTACCTGAGCGA |
| | GCTGAACACCTACCTGACCGTGCCTTGCGTGGACAAGGTGTACACATACAACCTGAGCCTGGATCAGCACCTGATCA |
| | ACAAGAGCCTGACCAGGGCCAAGAACCTGCTGCACGGCAAGAGCGATAAGGATCTGGCCGCCAGCCGGGAAGAGAT |
| | CAGAGAAGTTCTGGCCGGACACGACGCCAACGTGAAAACCAGCACCAAAGTGACCACCAACAAGAAGGCAGCCCAG |
| | TACAAGGGCTACAGCAGCGAGACAGTGCGGAATGCCGGCAATGCCGATAAGGGCCTGTCTACCCACGAGGGCAAGA |
| | CCAGCGATTCCAGCGAGAACATCTCCGACCTGGAAGCCCTGTGGCAGAGCTTCAACAAGGACTGA |
| | (SEQ ID NO: 424) |
| tnsC | AGTGCTGGCCGATCTGGAAAGCCTGTATCAGTCTGCCGAGATCGGCGGCGATCAGCTGTCTATGCTGCTGTGTGGCGA |
| | ATGAGCCTGACCGACGCCAACAAGAGCAAGATCCGGACCTTCAAGGACAGCTTCTGCCTGTACACCCCTGTGCGGGA |
| | AGTGCTGGCCGATCTGGAAAGCCTGTATCAGTCTGCCGAGATCGGCGGCGATCAGCTGTCTATGCTGCTGTGTGGCGA |
| | TACCGGCACAGGCAAGTCTGCCCTGATCCGGTACTTCAGCGAGACAAAGAACCAGAACCAGAGCGAGAGCCTGCCTA |
| | TCCTGCTGAGCAGAGTGCCTAGCAAGCTGACCGTGGAAGATACCACCAGACAGCTGCTGTGCGACCTGGGAGTGTTT |
| | GGCAGCAGCAGCCACCGGTACAAGAACACACAGTCTGACGCCCACCTGACCTCCAGACTGCTGGATGCCCTGAGAGT |
| | GAAGAACACCAAGCTGATCATCATCAACGAGTTCCAAGAGCTGATCGAGTTCAAGGGCGCCAGAGACAGACAGGCC |
| | ATCGGCAACAGACTGAAGCTGATCTCTGAAGAGGCCGGCGTGCCAATCGTGCTGGCTGGAATGCCTTGGATCGACGA |
| | GATCCTGAACGACAGCCAGTGGGCCTCTAGACTGGCCACCAGAAGGCACACCCTGAACTACCTGAGCCTGAGCAAGC |
| | GGCCCAAAGAGTACAACGAGCTGCTGAAGCTGCTGGAACAGAGCATCCCCTGCGAGGTGGAAAACTCCCTGACCGA |
| | GTTCGAGATCAGCCTGTCTCTGTTCGCCGCCAGCTGTGGCGAAATCAGGCAGCTGAAAGCCCTGCTGACCGAGGCCA |
| | TTAAGCTGTGCCTGATCAGCAGCAAGCCCCTGTCCAAGCAGAGCCTGTCCGACAGCTTCAAGAATCTGTACCCCGGC |
| | AACGAGAACCCCTTCGACCTGCCTAAAGAGAAGATCAAGATCAGGGAAGTCGAGATGCACAGCCAGTACATCAGAG |
| | GCGACAGCTCCCACAGAGCCAGCATCGAACCTCGGAGACTGAGCGAAGTGATGACCCTGACACAGATCCTGTCTAAG |
| | AAGTGA (SEQ ID NO: 425) |
| tnsD | ATGAGCTTCCTGCCTAACAGCATCGACCTGTACGAGGACGAGGCCCTGGAATCTGCTCTGCTGAGACTGTGCAGAGT |
| | GAACCACTTCGAGCACTACAGCGACCTGAGCATCGAAGTGAAGTCCTGGCTGGAAGAGAGACACCCCACAATTGCCG |
| | GCGCTTTCCCACTGTCTCTGGACGCCGTGAATATCTACCACGCCAAGCAGTCTAGCGCCCAGAGAGTGCAGGCCATCC |
| | AGCTGCTGGAACAGCTCGTGGGCCTGTCCAGATTCAGCCTGCTGGACATCTGCTTCAAGCACACCACCGCCGTGGATC |
| | TGGGCCAGTATGCTGAAGTGCGGTACAAGCAGATCAATATCCCCAGAGAATTCCTGCGGAGCACGATCATCCCTATC |
| | TGCCCCGAGTGCCTGAACGAGAGCAACTACGTCAGATTCGACTGGCACATCAACAAGGTGGAATGCTGCGAGAAGCA |
| | CGGCATCAAGCTGCTGAGAAACTGCCCCAGCTGTCACATCCCTCTGAACTACATGAACAGCGAGGACCCCGGCAGAT |
| | GTATCTGCGGCCTGAACCTGCTGCAGAACAGCCACAGAGAGTTCGGCTTCGACAGCTGGCGGGATCACTCTCTGTAT |
| | GAGGCCATCGGCAGCTGCAGCCTGTCTGAAAAACTGGCCGTGCTGGTGTTCAGCGACAAGTTCTTTCCCCTGCTGGCC |
| | TACGAGGACTTCATCGTGGATCCCAGACGGCACATCGACGAGTACCTGAATGGCCTGATCGAGCAGAATCTGCTGCT |
| | GGCCACCGAGAAGCCCAACAGACTGAGCTTTGCCCAGATCAGCAACGACTTCCTGGACGACATCAGCGCCATCAGCT |
| | GCCTGCCTCTGAAGATCAAAGAATTCATTGCTGGCGTGGTCATCACCCTGGCCATCAACGAGGAAAGAAGCACAATC |
| | GCCAACATCGGCGACACCCTGGTGTCTGCCAGAGAAGCCGCCGTGATCATCGGCTCCGAGCTGGACGATATCTACCG |
| | GCTGTACGAGAGCGGCATCCTGGTCGTTGGAAGAAGGCTGAGGAACGAGGGCAAGCTGGAATCTCACAACCCCGTGT |
| | TCCGGCTGAGAGATGTGGCATCTCTGGCCCTGAGCTACAGCAAGTACCAGTTCAGCCAGAGCGCCTGGTGA |
| | (SEQ ID NO: 426) |

[0123] 201025|11|GCA_003675895.1_ASM367589v1_genomic|ML014764.1|87048|She wanellaceae (ID: 129)

TABLE 39

| Elements | Sequences |
|---|---|
| tnsA | ATGTGCAAGGACGACGAGAACAGAGGCAGACGGGACGTGAAGAAACTGATGAGCCGGTCCATCAACGTGTTCCCCG |
| | CCAAGAAGTCCCTGGACGAGACAACCTTTACCGAGGGCACCCTGGAAGCCGACCTGTGCTACTACCTGGAATTCGAC |
| | CCCAAGGTGGTGTCCTACCAGCCTCAGCCTCACTGCATCAAGTACTTTCTGAACGATGAGAAGCACTGCTACACCGCC |
| | GACCTGCTGGTCAACTACTTCGACGGCAAGAAGCGGCTGATCGAGATCAAGTACAACCGGGACATCGACCGGATCAG |
| | CGACTTCGACGATTGGCGGCTGGCCATCAAGACCGCCTGTGAATCTCAGGGCTTCGAGTTCGAGGTGCTGACCGAGG |
| | ACGAGATCAGAAAGCAGCCCCTGTACGAGAATCTGACCCTGCTGTGGGCCAGCCACGATAAGGCTCTGGATAAGGGC |
| | TTCCTGGTCAAAGTGATCAACACCCTGGACCAGAACGACGACGTGCTGATCTCCGATCTGCTGCCCAAAGTGAACTTC |
| | GACAGCGAGCTGGAACAGGTGTACAAGCTGATCTTCGACCGGAAGATTCTGGCCCCTATCGATACCGAGTTCCTGAG |
| | CACCCAGACCAGCATCAAGCACAGCGGCGAGAGCTACGAGTGCTACCTGTAA (SEQ ID NO: 427) |
| tnsB | ATGAACGCCACCTACGAGACAGGCGACTTCATCACCATCAAGAACCACGACGTGTCCCACCAGTACGAGATCATCTA |
| | CAGCAGCCCCGACATCATCAAGCTGATCGATTCCTTCAGCGGAATCGCCAGCACCAGAAAGAGCAGAGAGCTGGACG |
| | AGCTGATCGTGTCCGGGATCGCCATCATCCACCAGAAGGACCTGCGGACCAGAAAGCTGCTGGAAAACAACGTGATC |
| | GACTTCGCCAGCTTTCCCGAAGAGAGCAAGCAGAAGGCCCGCGAGCGGTACATCTTTGTGTCCGGCATCCTGGAACA |
| | GAACCTGAAGTCTCACAGCGGCACCATCCTGAAGCCTATCGTGGAACAGATCTACAACGCCAACAGCTTCACCACGC |
| | TGACCAAGAAACCTGGCGTGCGGACAGTGCAGTACTGGCTGAAGTCCTTCAGGGACGCCAACTGCAGCATCAGAGCC |
| | CTGCTGCCTATCCACCACGCCAAGGGCAACAGAAACGTGAAGCTGGATGAGATCAAAGAGCCCTATATCGCCGCTGC |
| | CATCGAGTACTTCAAGACCCCTGAGAGGCCCAGCATCAGCAGCGCCTACGACTACCTGAAAACCCTGATCAACTACG |
| | ACAACAAGATCCTGAGCAAGAGCGAGAAGATCAAGGTGCCCAGCCTGAGCGCCTTCATCAAGAGACTGGAAAAGTT |
| | CGCCAAGAACGAGATCTTCGCCGCCAGACTGGGCAAAGACGAGGCCCGGAAGAGATTCAAGCTGAACCAGCTGAGC |
| | CAAGAGATCAAGTTCATCCTGCAGCGCGTGGAAGTGGATCACACCCAGGCCGATCTGTTCATCGTGGACAGCAAGCT |
| | GAGCATGATCCTGGGCAGACCCTACATCACCGTGCTGCTGGACTACAAGAGCAAGTCCATCCTGGGCTTCTACATCG |
| | GCTTCGAGAAGCCCTCCTACCTGTCCGTGGCTAGAGCCCTGAAGCACAGCATCCTGCCTAAGACCTATCTGAAAGAA |
| | CTGTACCCCGAGGTGGAAAGCGAGTGGGACTGTTACGGCATCCCCAAGACACTGGCCGTGGACAGAGGCAAGGATTT |
| | CGAGTCTGTGGCCCTGATCGACGCCTGCCACGACCTGAACATCCGGATCGAGAGAAACCCCGCTAAGCACCCCTGGT |
| | ACAAGGGCAGCGTGGAAAGCTTCTTCAAGAGCATCAACACCAAGCTGTTCGACGACATGAAGGGCAAAGTGTTCCCC |
| | GACATTGTGGACACCAACCTGTACAACCCTCAAGAGCACGCCGTGATTACCATGGACCTGTTTCTGAAACTGTTTCAC |
| | GTGTGGATCGTGGACGTGTACCAGCAGGATCTGGTGTCCAAGGGCACAATCATCCCCAGAGTGTCCTGGCAAGAGGA |
| | CCTGAAATCTGTGCCTCGGAGAGTGATGAACAAGGACGACCTGGATATCGTGCTGAGCGAGACAACCGACCGGAAG |
| | AATTCTCCTGCCGGCATCGTGTTCGACCACATTTGGTACGACAACGACGAGCTGCTGAAGTATCGGAGCGAAGTGGG |
| | CTTCACCAAAGTGACCATGAAGTACAACCGCGAGGATCTGGGCTTCATCTACGTGCTGGACGAACGGAACCCCAGCT |
| | ACAAGCACTACTTTAAGGTGCCCGCCGTGGACCAGAAGTATGCCAAGGGACTGTCTCTGCACCAGCACCAAGTGATC |
| | AAGGCCTTCAACAAGAACAAGCTGCAGCAAGAGCACAATACCGAGAACCTGGCTGCCGCCAAGATGAAGATCATGC |
| | AGCTGATCTCCAACTTCCTGGACAGCGCCAGCAGCAAGAAGATCAGCTCCAGCCAGAAACTGAGCCGCTTCATGAAC |
| | GTGGGCCAGCAGACCGACCAGACCGTGAAGTCTAGCGTGACCGACATCAGCACACAGATCCCCACCGTGCAAGAGA |
| | TCCACAGCGACACCGAGGAATCCAACGAGGTGCTGGAAATCTACGACGGGATCCACAACAGCCTGCCTGACAAGCTG |
| | AATTTCTGA (SEQ ID NO: 428) |
| tnsC | ATGAAGCAGAAAGAGGACGACCTGATCGAGAGCCTGATCTTCTTCGTGCCCACCGACAGCCTGGAAAAGACCCTGAT |
| | CGCCCTGAAGGACATCAGAGAGTACAGCAAGATCCACAACTACCGGGTGCCACCTAAGTGCATGCTGCTGACAGGCG |
| | AAACAGGCGTGGGCAAGACCTTCTTCATCGAGCAGTACCTGGAATCTCACCCCAGCTACGACGTGTCCTGCGACGAT |
| | GGCGAGAAAACCATCGTGCCCGTGCTGTACTGCCAGCTGCCTAAGGCTAAGCACCCCAAGCCTGTGGTGTCTCAGCT |
| | GCTGTCTAAGCTGGGCGACCCTCTGAAGAGGCCTAAAGGGGATGTGCGGGAACTGACCCAGAGCCTGGTGTACCTGC |
| | TGAAAGAAGTGAAAACCGAGCTGATCATCGTGGACGAGGTGCAGCACGCCATCGAAACCACCAACAAGAACGTGAT |
| | CCAAGAGATCGGCGAGTGGTTCAAGATCCTGATCAACGAGAGCAGAATCCCTATCGTGCTCGTGGGCGTGCCATGGG |
| | CCAAACCTGTGATCGATGTGAACGCCCAGCTGCGGAGAAGAGTGCGCTACCACTTCGAGCTGAGCAACTACACCCTG |
| | AAGAACTTCAACAAGTTCCAGATGTTCCTGCAGAACGTGCAGAAGAAACTGCCCCTGAACGTGTACAGAACCCTGTG |
| | GGAAGTCGAGATGGCCTTCAGACTGTTTGCCGCCAGCCACGGCAATATCAGCGAGCTGATGGACGGCACAATCATCC |
| | CCGCCTGCGAGAATGCCATCCTGCAGGGCAAAAGCGTGGTGGAAGAGAGCAATTTCATCGAGGCCGTGAACGAGAA |
| | CGCCAACTTCAAAGAGAAGAACCCCTTCAGCATCAAGAGCGTGCGGGACGTGATCGCCTACCAGCAGAAAACCAGC |
| | AGCAAGTTCAAGAAGAATGCCAAGCGCAAAGAGGAACGGATCGTCGACGCCATCTACACCAAGATCAAGTTCGACG |
| | ATCTGAAGCTGAGCGAGGTGCTGAGCAAGAAGTGA (SEQ ID NO: 429) |
| tnsD | ATGAAGTTCCTGAAGCGGATCAAGCTGTTCCCCGACGAGGCCCTGGAAAGCTACTTCATCAGATGCGCCCACAGCAA |
| | CGGCTTCCAGAAGATCAGCCTGTTCCTGCAGAGCCTGAGCGCCTTCATCAGCCTGAGAGACAAAGAGCTGAAAGGCG |
| | CCCTGTCTGCCAGCCTGTCCAGACTGAATCTGCACAAGGCCCACAACAGCAGCGCCTATAGAGTGCGGGCCATCAAG |
| | CTGCTGGAAGAGTTCTGCGATCTGCAGCCCAGCTGCCTGCTGAGAGTTGCCGTGCTGAGGACCAACAGACACTTCGG |
| | CAGCTATGTGGCCCTGGCCAGATCCAACGTGCTGTTCCCTAACATCATGCTGCGCGAGCACGTGATCCCTGTGTGCCC |
| | TCTGTGTCTGCAAGAGCGGAACTACATCCGGTTCATCTGGCACCTGAAGCCTATCCAGAGATGCCCCAAGCACCAAG |
| | TGAAGCTGATCTTTAACTGCCCCGAGTGCGGCAACGACATCAATTACATCCAGAGCGAGAACATCGAGCTGTGCAGC |
| | TGCGGCTACGACTTCAGACAGATCAAGCCCAGCGAGAAAACCGAAGAGAGCATGAGCGCTAGCCTGTTCGAGAGCA |
| | GCGAGAACGCCGATAAGCTGAGCCTGGAATTCGGCAAGTACCTGTGGTTCAGCAAGCACAGCGGCGTGGAACTGGA |
| | CGACGACTACTTCCTGCCTAAGTTCAACCGGTACTTCAGCAACTGGCCCGACAACTACCTGAGCTACCTGAAAACCCA |
| | AGAGTCCAAGGCCATCGAGAAGCAGACCAGCCGGTTCAACCAGATCAGCGTGAACGACATTTGGTGCGAGCAGCTG |
| | CAGAACACCAGACTGGTCACCACCAACAGAGTGAACAACCTGGTGCTGGACCAGCTGGCCAATTACTTCATCGACCT |
| | GGTCAACAGATACCCCAAGTGCCAGCACGCCAATATCGCCGACACACTGATCAACCAGGTGGACTCTGCCCTGCTGC |
| | TGAGAACCTCTGTGGAACAGGTGTTCCGGCTGCTCGAGGACGGCTATCTGAAAGTGAAGTTCGGCGTGCCCACCGAG |
| | GCCATCTACAAGCCTCACATCCCCATCTTCTACCTGCGGGAAGTGATCGAGCTGACACAGGCCCAGGGCAGCAACAC |
| | CAGCATGTTCGAGCACATGATCAGCGCCTGGTGA (SEQ ID NO: 430) |

[0124] 201736|1|GCA_003691505.1_ASM369150v1_genomic|CP033138.1|2507977|Vib rio (ID: 130)

TABLE 40

| Elements | Sequences |
|---|---|
| tnsA | ATGTCTGCCCTGCCTAGCCTGTCTACAGCCACACTGCTGGAACTGGAAACCGCCTTCGATACCCCTGCCAGAAACCTG |
| | ACCAAGAGCCGGGGCAAGAACATCCACAGATACGTGTCCGCCAAGATGGGCAAGCGCGTGACCGTGGAAAGCTTCC |
| | TGGAATGCGCCGCCTGCTACCACTTCGACTTCGAGCCTTCTATCGTGCGGTTCTGCAGCCAGCCTATCCGGTTCAGCT |
| | ACAACCTGAACGGCAAGACCCATACCTACGTGCCCGACTTCCTGGTGCAGTTCGATACCGGCGAGTACAAGCTGTAC |
| | GAAGTGAAGTCCGACAAAGAGAGCAGCAACGAGGAATTCCACTGCGAGTGGGAAGCCAAAGTGCAGGGCGCCTTTG |
| | ACATCGGCCTGGAACTCGAACTGGTGGTGGAAGAGGACATCCTGGACGAAGTGATCTTCAACAATCTGAAGCTGCTG |
| | CACCGCTACGCCAGCCGGGATAACCTGAATGACTTCCACCAGATCCTGCTGACCACACTGAAGCGGAATGGCACCCA |
| | GACAGCCAAGTCTCTGGGACACCACCTGGGCCTGAATGGCAGAAAGATCCTGCCTTTCCTGTGCGACCTGCTGAGCC |
| | GGAATCTGCTGCAGACAAGCCTGGAAACCCCTCTGTCTCTGGAAAGCGAGTTCGAGCTGGGCTGCTACGCTTGA (SEQ |
| | ID NO: 431) |
| tnsB | ATGCCCAAGAAGTCCTTCAGCAGCTTCCACAGAAAGAGCGCCCTGCAGCAAGAGAAGCTGGAACAGAACGACAGAG |
| | TGGTGGACAGCAACGACGTGGACGAGGCCATCTACCAGGACATCAGCGCCTTTCCAGAGAATATCGCCAACCAGATC |
| | ACCTTCCGGCTGAGCATCCTGAGATTTCTGGCCGGCAAGTGCGAGAAGATCACCCCTAAGACCATCGAGCCCTACAG |
| | AGTGGCCCTGCAGAGACTGCACGACACAAACATCCCCAGCAGCATCAGCATCTACCGGTGGTGGCTGGTGTTTAGAG |
| | CCAGCGGCTACAACCCCGTGTCTCTGGCCCCTAACTTCAAGAGCAGAGGCAACAGAGGCGCCAAGGTGTCCCCTGTG |
| | GTGGACTCCATTATGGAACAGGCCGTGGAAAGAGTGATCAGCGGCCGGAAGATCAACATCAGCTCTGCCCATCGGAG |
| | AGTGAAGCGGAAAGTGCGGCAGTACAATCTGACCCACGGCACCAACTACAGCTACCCTAAGTACGAGAGCGTGCGG |
| | ATCAGAGTGAAGAAGAAAACCCCTTTCGAGGTGCTGGTGGCCAAGAAAGGCGAGAGAGTGGCCAAGCGCGAGTTCA |
| | GAAGAATGGGCAAGAAGATTACCACCAGCGCCGTGCTGGAACGCGTGGAAATCGACCACACAATGGTGGACATCTT |
| | CGCCGTGCATCCCGTGCACAGAGTGACACTTGGTAGACCCTGGCTGACCCAGCTGGTGGACTGTTACTCTAAGGCCGT |
| | GATCGGCTTCTACCTGGGCTTCGAGCCTCCTAGCTACGTGTCAGTCAGCCTGGCTCTGAAGAACGCCATCCAGAGAAA |
| | GGACGACCTGCTGAGCAGCTACGAGAGCATCGAGAACGAGTGGCTGTGCTACGGCATCCCCGATCTGCTGGTCACCG |
| | ACAACGGCAAAGAGTTCCTGAGCAAGGCCTTCGACAAGGCCTGCGAGAGCCTGCTGATCAACGTGCACCAGAACAG |
| | AGTGGAAGTGCCCGACAACAAGCCCGACGTGGAACGGAAGTACGGCACCATCAATACCAGCCTGCTGGACGATCTG |
| | CCCGGAAAGGCCTTCAGCCAGTATCTGCAGAGAGAAGGCTACGACTCCGTGGATGAAGCCACACTGACCCTGGACGA |
| | GATCCAAGAGATCTACCTGATCTGGCTGGTGGATATCTACCACAAGGGCAGCAACCAGCGGGGCACAAACTGCCCTA |
| | ATATCGCCTGGCGGAACGGCTGCCAAGAGTGGGAGCCTGAGGAATTCAGCGGCCCCAAGGACGAGCTGGACTTCAA |
| | GTTCGCCATCGTGGATAGCAAGCAGCTGACCAAGGCTGGCGTGACCGTGTACAAGGGCCTGACATACAGCTCCGAGA |
| | GACTGGCCGGCTACAGAGGCAAAAAGGGCAATCACAAGGTGCAGTTCAAGTACAACCCTGAGTGCATGGCCGTGATT |
| | TGGGTGCTCGACGAGGACGTGAACGAGTACTTCACCGTGAATGCCATCGACTACGAGTACGCCAGCAGAGTGTCTCT |
| | GTGGCAGCACAAGTACAATATGAAGTACCTGGCCGAGCTGAACAGCGCCGAGTACGATGAGGACAAAGAGATCGAC |
| | AGCGAGATCAAGATCGAGGAAATCGCCGACCGGTCCATCCTGGAAACAAAGAAGATCAGAAGCCGGCGGAGGGGCG |
| | CCAGACACCAAGAAAATTCTGCCAGAGCCAAGAGCATCTCCAACACCAAGCTGGTGCCTCCACAGAAGGACGAGGA |
| | AGAGATCGTCATCGTCGACAACGAGGACTGGGACATCGATTACGTGTGA (SEQ ID NO: 432) |
| tnsC | ATGAACGAGACAAGAGAGGCCCGGATCAGCAAGGCCAAGAGGGCCTTTGTGTCTACCCCTAGCGTGACCAAGATCCT |
| | GAGCTACATGGACCGGTGCAGGGACCTGAGCGATTTCGAGTCTGAGCCTACCTGCATGATGGTGTTTGGCGCCTCTGG |
| | CGTGGGCAAGACCACCGTGATCAAGAAGTACCTGAGCCAGAACAACCGGGACAGCAAAGTGCGGGGAGATGTGGTG |
| | CCTGTGCTGCACATTGAGCTGCCCGACAATGCCAAGCCTGTGGATGCCGCTAGAGAACTGCTGCTGGAAATGGGCGA |
| | TCCCCTGGCTCTGTACGATACCGACCTGGCCAGACTGACCCAGAAGCTGACCGATCTGATCCCTGTCGTGGGCGTGAA |
| | GCTGATCATCATCGACGAGTTCCAGCACCTGGTGGAAGAGAGAAGCAACCGGATCCTGACACAAGTCGGCAACTGGC |
| | TGAAGATGATCCTGAACCGGACCAAGTGTCCCATCGTGCTGTTCGGCATGCCCTACAGCAAGGTGGTGCTGACCGCC |
| | AATTCTCAGCTGCACGGCAGATTCAGCATCCAGTTCGAGCTGCGGCCCTTCAACTATCAAGGCGGAGAGGGCGTGTT |
| | CAAGAACTTCCTGTGGAACCTGGACAAGGCCCTGCCTTTCGACAAAGAGATCGGCCTGGCCAACGACGACCTGAAGA |
| | AGAAGCTGTACGCCTTTAGCCAGGGCAACATGCGGAGCCTGCGGAACCTGATCTATCACGCCTCTGTGGAAGCCATC |
| | GACAACAACCACGACACCATCACCATCAAGGACTTCGTGTTCGCCGCCAAGCTGACCAGCGGCGATAAGCTGAGCAG |
| | CTGGATCAACCCCTTCGAGAAGGGCACCAAAGTGACCGAGCAGATGCTGAGGCCTCCTCCAGAGGATATCGGCTGGG |
| | AAGATTACCTGAGAAACAAGCCCAAGAAGAACCGGAAGAACCAGGACTCCAACATGTTCGACTGA |
| | (SEQ ID NO: 433) |
| tnsD | ATGTTCCTGCAGCGGCCCAAGCCTTACTCCGACGAGAGCCTGGAAAGCTTCTTCATCAGAGTGGCCAACAAGAACGG |
| | CTACAGCGACGTGCACCGGTTTCTGGAAGCCACCAAGGGCTTTCTGCAGGACATCGACCACAACGCCTACCAGACAT |
| | TCCCCACCAATATCGCCAAGATCAACCCCTGCCTGGCCAAGGATTCTAGCGGAGCCAGAACAGCCAGCCTGCTGAAA |
| | CTGGCCCAGCTGACCTTCAACGAGCCTACAGAACTGCTGGGCCTCGCCATCAACCGGACCAACCTGAAGTACAGCCC |
| | TAGCACCAGCGCCGTGATCAGAGGCAGCGAAGTGTTCCCTAGAAGCCTGCTGCGGACCAAGTCTATCCCTTGCTGCC |
| | CTCTGTGCCTGCAAGAGAATGGCTACGCCAGCTACCTGTGGCACTTCGAGGGCTACGATCACTGCCACATCCACGATG |
| | TGCCCCTGCTGAACAGCTGTAGATGTGGCGCCGAGCACGACTACAGAGTGTCTAGCCTGTCTGGCATGTGCGGCTCTT |
| | GCGAAGCCACACTGGCCATCAAGAGCAGAGAGAAGTCCCACAGCGCCACACTGAGCGTGGCAAATTGGCTGGCCGG |
| | CAACGAGTGCAAGAACCTGCCTCACGTGCCCCGGTCTTATAGATGGGGACTCGTGCACTGGTGGTCCCACATCAGCG |
| | ACAACGAGTTCGACCACTTCAGCTTCGTGCAGTTCTTCAGCAACTGGCCTCGGGCCTTCCACAGCATGATCGACGACG |
| | AGATCGAGTTCAACCTGGAACACGCCATCGTGGGCAAGAAAGAACTGAGAGTGAAGGACCTGTTCGGCCGGATCTTC |
| | TTCAGCTCCATCAGACTGCCCGAGCGGAACCTGCAGCAGAATATCGTGCTGGGCGAGCTGCTGAGACACGTGGAAGC |
| | TCACCTGTGGGACAATGAGGGCCTGCTGGCCAACCTGAGAATGAACGCCCTGGAAGCTACCGTGTTCCTGAACTGCA |
| | GCCTGGATGAGATCGCCAGCATGGTGGAACAGCGGATCCTGAAGCCTAACCGGAAGCCTAAGCCTAACATGCCCCTG |
| | GCCGTGAACGACTACCTGTTCTACTTCGGCGACATCTTCTGCCTGTGGCTGGCTGAGTTCCAGACCGACGAGTTCAAT |
| | CGGTCCTTCTACGTGTCCCGGTGGTGA (SEQ ID NO: 434) |

[0125] 209559|12|GCA_003947355.1_ASM394735v1_genomic|PSZI01000003.1|412992|Aeromonas (ID: 131)

TABLE 41

| Elements | Sequences |
|---|---|
| tnsA | ATGTACAGACGGCACCTGAAGCACAGCAGAGTGAAGAACCTGTTCAAGTTCGTGTCCGCCAAGATGAATACCGTGTT |
| | CACCGTGGAAAGCAGCCTGGAATTCGATACCTGCTTCCACCTGGAATACTCCCCAGCCGTGAAGGCCTTTGAGGCCC |
| | AGCCTGAGGGCTTCTACTACACCTTCGAGGGCAGAGACTGCCCCTACACACCCGACTTCAGAGTGCTGAACGAGAAC |
| | GGCAGCGTGGGCTACCTGGAAGTGAAGCCTTCTGCCAAGGTGCTGGAAAGCGACTTCCTGCAGCGGTTCCCATTCAA |
| | GCAGCAGAGAGCCACCGAGCTGAGCTGCCCTCTGAAGCTGATCACCGAGCGGCAGATCAGAATCGACCCCATCCTGG |
| | GCAACCTGAAGCTGCTGCACAGATACAGCGGCTTCCAGAGCTTCACCCCTCTGCACATGCAGCTGCTGGGACTCGTG |
| | AAGGACTTCGGCAGAGTGTCACTGGCCAGACTGAGCGGATCTACAGGTGCTCCTCCTGGCGAAGTGCTGGCCACAGT |
| | GCTGTCTCTGATTGCCAGAGGCCTGATCCACAGCGATCTGGCCGAACACGAGATGGGCTTCAGCACCATCGTGTGGA |
| | TGCGGTGA (SEQ ID NO: 435) |
| tnsB | ATGTGTGCCCAGCCTACCACAGAGGTGCCCAGCGATCTGTTCGAGGACGAGTTCACACACCCTCATCCTCCAGAGAG |
| | CCCTAACCTGGCCGCCACAACACCTACAGTGCTGAGCGCCACCGTGGATAGCTTTCCCGCCGATCTGAAAGCCCAGG |
| | CTCTGCACAGACTGGACTACATCAGATGGATCGAGGACAACCTGGCTGGCGGCTGGACCGAGAAAAATCTGGCTCCT |
| | CTGCTGGTGGAAGCCGCCAAAGTTCTTCCTCCTCCTGCTCCTAACTGGCGGACACTGGCCAGATGGCAGAAGAACTAC |
| | AACCAGCACGGCCGGAAGCTGATGGCTCTGATCCCTAAGCACCAGGCCAAGGGCAACGTGAAGTCCAGACTGCCTAG |
| | CAGCGACGAGGTGTTCTTCGAGCAAGCCGTGCACTGTTTCCTCGTGGGCGAGCAGCCTTCTATCGCCAGCGTGTACCA |
| | GTACTACACCGACATCATCTGCATCGAGAACCTGAACGTGGTGGAAAACCCCATCAAGGCTATCAGCTACACCGCCT |
| | TTTTCAACCGGCTGAAGAAGCTGCCTGCCTACCAAGTGATCAAGAGCCGGAAGGGCAGCTACATGGCCGACGTGGAA |
| | TTCATGGCCATCAGCAGCCACATTCCTCCAAGCTGCGTGATGGAACGCGTGGAAATCGATCACACCCCTCTGGACCTG |
| | ATCCTGCTGGACGATGATCTGCTGGTCCCTCTGGGCAGACCTTGTCTGACCCTGCTGATCGACAGCTACAGCCACTGC |
| | GTCGTGGGCTTCAACCTGAGCTTCAACCAGCCTGGCTACGAGAGCGTGCGGAACGCCCTGCTGAATAGCATCCCTCCT |
| | AAGAACTACGTGAAGGACAAGTACCCCAGCGTGGAACACGAGTGGCCTTGCTATGGAAAGCCCGCCACACTGGTGGT |
| | GGACAACGGCGTGGAATTTTGGAGCAAGAGCCTGGAACAGAGCTGCAGAGAGCTGAACATCAACACCCAGTACAAC |
| | CCCGTGCGCAAGCCTTGGCTGAAGCCCATGGTGGAAAGAATGTTCGGCACCATCAACCGCAAGCTGCTGGAATCTAT |
| | CCCCGGCAAGACCTTCTCCAACCTGCTGGAAAGAGGCGAGTACGACCCTCAGAAAGACGCCGTGATGCGGTTCAGCA |
| | CCTTCCTGGAAATCTTTCACCGGTGGATCATCGACGTGTACCACTACGAGCCCGACAGCAGAAGGCGGTACATCCCTA |
| | TCCAGAGCTGGCAGTACGGCTGCAACAAACTGCCTCCAGCTCCTGTTGTGGGCGACGATCTGGCCAAGCTGGAAGTG |
| | ATCCTGAGCATCAGCCTGCAGTGCACCCACAGAAGAGGCGGCATCCAGAGATTCCACCTGAGATACGACTCCGACGA |
| | GCTGGCCTCCTACCGGATGAACTACCCCGATAAGACCCACGGCAAGAGAAAGGTGCTGGTCAAGCTGAACCCCAGGG |
| | ACATCAGCTACGTGTTCGTGTTCATCAAAGAGGCCGGCAGCTTTATCAGAGTGCCCTGCATCGATCCCGAGGGCTACA |
| | CAAAGGGCCTGAGCCTGCAAGAGCACCAGATCAACATGAAGCTGCACCGGGACTTCATCGACACCCAGATGGATGTG |
| | GTGTCCCTGGCCAAGGCCAGAACCTACATCAACAGCCGGATCCAGAGCGAGCTGAGCGAAGTTCGGCAGACCCTGAA |
| | GAAGAGAAACACCAAGGGCATCAACAAGATCGCCCGGTACAGAGACATCGGCAGCCAGACAACAACCGGCCTGCTG |
| | TCTGGACCTCAGCTGTCCGAGAGCAAGGACGACGTGCCAATCCAGCCTAAGACCACACCTCCTCAGCTGGAAGATGA |
| | CTGGGACAGCTTCACCAGCGGCCTGGAACCTTACTGAT (SEQ ID NO: 436) |
| tnsC | ATGGAACTGAGCAGCACCGACGCCGACAAGCTGAAGTCCTTCATCGAGTGCTACGTGGAAACCCCTCTGCTGCGGAT |
| | CATCCAGGACGACTTCGACCGGCTGAGATACGACAAGCAGTTTGCCGGCGAGCCCATCTGCATGCTGCTGACAGGCG |
| | ATTCTGGCACCGGCAAGAGCAGCCTGATCCGGCACTACATGGCCCAGTTTCCAGAGCAGCACGGCCACGGATTTGTG |
| | CGGAAACCTCTGCTGGTGTCTCGGATCCCCAGCAAGCCTACACTGGAAAGCACAATGGTGGAACTGCTGAAGGACCT |
| | CGGCCAGTGGGGCAGCGAGTATAGACTGCATAGAAGCAGCGCCGAGAGCCTGACAGAGGCCCTGATCAAGTGTCTG |
| | ACCAGATGCGAGACAGAGCTGATCATCATCGACGAGTTCCAAGAGCTGATTGAGAACAAGACCCGCGAGAAGCGGA |
| | ACCAGATCGCCAACCGGCTGAAGTACATCAGCGAGACAGCCAAGATTCCCATCGTGCTCGTGGGAATGCCTTGGGCC |
| | GCCAAGATTGCCGAAGAACCTCAGTGGGCCAGCAGACTGATGGTGCAGCGGACAATCCCATTCTTCAAGCTGAGCGA |
| | GGACGCCGAGTCCTTCGTCAGATTCGTGATGGGCCTCGCCAGACGGATGCCTTTTGCCACACCTCCTAAGCTGGAAGC |
| | CAAGCACACCATCTTCGCCCTGTTCGCCTTCAGCTATGGCTGCGTGCGGCGGCTGAAACACCTTCTGGATGAGTCTGT |
| | GAAGCAGGCCCTGGCCGCTCACTCTGAAACACTGCTGCACGAGCATATCGCCGTGGCCTTCGGCCTGTTCTACCCCGA |
| | CCAAGAGAACCCATTCCTGCAGAGCATCGATGAGATCAAGGCCTGCGAAGTGACCCAGTACAGCAGATACGAGATC |
| | AACGAGAGCGGCACCGAGGAAGTGCTGAACCCTCTGAAGTTCACCGACAAGATCCCCATCAGCCAGCTGCTGAAGA |
| | AGCGGTGA (SEQ ID NO: 437) |
| tnsD | ATGCAGCTGCTCGTCAGACCTGCTCCTTTCAGCGACGAGAGCCTGGAAAGCTACCTGCTGAGACTGAGCCAAGAGAA |
| | CGGCTTCGAGAGATACGCCCTGCTGTCTGGCGCCATGAGAGATGCTCTGCTCCAGCAGGATCATCAGGCCGCTGGCG |
| | CTTTTCCTCTGGAACTGGCTCGAGTGAACGTGTTCCACGCCAACAGATCCAGCAGCCTGAGAGTCAGAGCCCTGCACC |
| | TGATTGAGCAGCTGACAGATCTGGCCCCTCACAGCCTGCTGCAGCTGGCCCTTATCAGATCCGCCATGCCTATTGGAG |
| | CCGGCCATGCCTGTGTTCAGAGAGGCGGAGTTGACATCCCTCTGAGACTCGTGCGGACCAGACAGATCCCTGTGTGTC |
| | CAGTGTGTCTGAGCGAGAGCGCCTACATCAGACAGCATTGGCACTACGCCCCTTACGTGGCCTGTCATCTGCACGGAC |
| | ACGAACTGCTGAGCGTGTGTCCTTCTTGTGGCAAGGCCCTGGACTACCAGTGCAACGAGAGCTTCACCCACTGCAGAT |
| | GCGGCTTCGACCTGCGGCACTCTATTACACCACCAGCCAGCAACCAGGCCATCCAGATCTCTGCCCTGATCTGCGGAG |
| | CCAGATGGGAGAGCACAAACCCTCTGCTGATCTGCCCTCATCCTAGCCAGCTGTTCGGCGCCATCTTCTGGTACTGGT |
| | GCAGATACCATGCCGAAGCCGCTGGACAGCCTGCCTCTCATTCTCTGGTCCAGACCATCGACTACTTCGCCGCCTGGC |
| | CTGCCAATTTTCACGCCGAACTGGATCAGTGGGCCCAGAGAGGACTGCTGAGGCAGACCAGACTGCTGAACGAGACA |
| | CCTTTCGGCGAGGTGTTCGGAGCCGTGCTGAGTGATTGCAGACAGCTGCCATTCCAGGACCTGGGCGCCAACTTTATC |
| | CTGAGAGCCCTGAGCGACTACCTGACAGCCCTGGTGGTCAATCACCCCAAGACCAGGCAGCCCAACCTGGGCGATAT |
| | TCTGCTGTCCGCCTCTGATGCTGCCGCTCTGCTGAGCACATCTGTGGAACAGGTGTTCCGGCTGCAGCAAGAGGGCTA |
| | TCTGACCCTGGCCTACAGACTGAGAAGGCACGCTGGCCTGACACCTTACGACCCCATGTTCCACCTGAGACAAGTGA |
| | TCGAGTACCGGCTGGCCCACGGCGCTATGTATCCTCCAGCCTTCTACAGCTTCCTGCCTGCCTGGTAA |
| | (SEQ ID NO: 438) |

[0126] 212597|1|GCA_004022545.1_ASM402254v1_genomic|CP034971.1|1985753|Vib rio (ID: 132)

TABLE 42

| Elements | Sequences |
|---|---|
| tnsA | ATGTCTGCCCTGCCTAGCCTGTCTACCGCCACACTGATTGCCCTGGAAAGCGCCTTCGATACCCCTGCCAGAAGCCTG |
| | ACAAAGAGCCGGGGCAAGAACATCCACAGATACGTGTCCGCCAAGATGGGCAAGCGCGTGACCGTGGAAAGCTTCC |
| | TGGAATGCGCCGCCTGCTACCACTTCGACTTCGAGCCTTCTATCGTGCGGTTCTGCAGCCAGCCTATCCGGCTGAGCT |
| | ACTGCCTGAATGGCAAGACCCATACCTACGTGCCCGACTTCCTGGTGCAGTTCGACACCGGCGACTACAAGCTGTAC |
| | GAAGTGAAGTCCGACATGGAAAGCAGCAAAGAGGAATTCCACTGCGAGTGGGAAGCCAAGGTGCAGGGCGCCTTTG |
| | GAATCGGCCTGGATCTGGAACTGGTCACCGAGGAAGAGATCCTGAACGAAGTGATCTTCAGCAACCTGAAGCTGCTG |
| | CACCGCTACGCCAGCAGAGATCACCTGAACGACTTCCACCAGACACTGCTGGCCACTCTGAAGCCCAATGGCACCCA |
| | GACAGCCAGATCTCTGGGACACCATCTGGGCCTGAGCGGCAGAAAGATCCTGCCAATCCTGTGCGACCTGCTGAGCA |
| | GAAACCTGCTGCAGACCAACCTGGAAACCCCTCTGAGCCTGGAATCCGAGTTCGAGCTTGTGTGCTACGACTGA |
| | (SEQ ID NO: 439) |
| tnsB | ATGACCAAGAAGTCCTTCAGCAGCTTCCACAGAAAGAGCGTGCTGCACCAAGAGAAGCTGGAACAGAACGACAGAG |
| | TGGTGGACATCAACGACGTGGCCGAGGCCACCTACAAGGACATCAGCGCCTTTCCAGAGAAGATCGTGGTGGAAATC |
| | ACCTTCCGGCTGAGCATCCTGAGACTGCTGGGCAGAAAGTGCGAGAAGATTGTGCCCAAGAGCATCGAGCCCCACAG |
| | AGTGGATCTGCAGAGAAGCCACGACCGGAAGATCCCTAGCGCCATCACCATCTACAGGTGGTGGCTGACCTTCCGCG |
| | AGAGCGACTACAACCCTGTGTCTCTGGCCCCTGACTTCAAGAGCAGAGGCAACAGAGATCCCAAGGTGGCCCCTATC |
| | GTGGACGCCATTATGAAGCAGGCCGTGGAAAGCGTGATCAGCGGCAGAAAGATCAACATCAACAGCGCCTATCGGC |
| | GCGTGAAGCGGAAAGTGCGGCAGTACAATCTGACCCACAGCACCAAGTACAAGTACCCCGAGTACGAGAGCGTGCG |
| | GATCAGAGTGAAGAAGAAAACCCCTTTCGAGATCCTGGCCGCCAAGAAAGGCGAGAGAGTGGCCAAGCGCGAGTTC |
| | AGACGGATGGGAAGAAAGATCCTGACCAGCAGCGTGCTGGAAAGAGTGGAAATCGACCACACAGTGCTGGACCTGT |
| | TCGCCGTGCACGAGGAACACAGAATCCCTCTGGGTAGACCCTGGCTGACCCAGCTGGTGGATTGCTACTCTAAGGCC |
| | GTGATCGGCTTCTACCTGGGCTTCGAGCCTCCTAGCTACATGAGCGTTAGCCTGGCTCTGAAGAACGCCATCCAGCGG |
| | AAGGATACCCTGCTGAGCAGCTACCCCAGCATCGAGAATGAGTGGCTGTGCTACGGCATCCCCGATCTGCTCGTGAC |
| | CGACAACGGCAAAGAGTTCCTGAGCAAGGCCTTCGACAAGGCCTGCGAGAGCCTGCTGATCAACGTGCACCAGAAC |
| | AAGGTGGAAACCCCTGACAACAAGCCCCACGTGGAACGGAACTACGGCACCATCAATACCAGCCTGCTGGACGACCT |
| | GCCTGGCAAAGCCTTTAGCCAGTACCTGCAGCGCGAGGGCTACGATTCCGTGTCTGAAGCCACACTGACCCTGGACG |
| | AGATCAAAGAGATCTACCTGATCTGGCTGGTCGACATCTACCACCGGAAGCCTAACCAGCGGGGCACCAACTGTCCT |
| | AATGTGGCTTGGAGACAGGGCTGCCAGAACTGGGAGCCCGAGGAATTTCTGGGCAGCAAGGACGAGCTGGACTTCA |
| | AGTTCGCCATCGAGGACCACAAGCAGCTGACCAAGGCCGGCATCACAGTGTCTAAGGGCCTGACCTACAGCAGCGAA |
| | AGACTGGCCGGCTACATGGGCAAAAAGGGCAACCACAAGGTGCAGTTCAAGTACAACCCCGAGTGCATGGCCGTGA |
| | TTTGGGTGCTCGACGAGGACGTGAACGAGTACTTCACCGTGAATGCCATCGACTACGAGTCCGCCAGACGAGTGTCT |
| | CTGTGGCAGCACAAGTATAACATGAAGTACCAGGCCGAGCTGAACAGCGCCGAGTATGACGAGGACAAAGAAATCG |
| | ACGCCGAGATCAAGATCGAGGAAATCGCCGACCGGTCCATCCTGGAAACAAAGAAGATCAGAAGCCGGCGGAGAGG |
| | CGCCAGACACCAAGAAAATTCTGCCAGAGCCAAGTCCATCAGCAACACCAAGCTGGTGCCTCCACAGAAGGACGAG |
| | GAAGAGATCGTCATCGTCGACAACGAGGACTGGGACATCGATTACGTGTGA (SEQ ID NO: 440) |
| tnsC | ATGGACGAGGACAGAGAGACACGGATCAGCAAGGCCAAGCGGGCCTTTGTGTCTACCCCTAGCGTGACCAAGATCCT |
| | GGGCTACATGGACCGGTGCAGAGAGCTGAGCGATTTCGAGAGCGAGCCTACCTGCATGATGGTGTTTGGAGCCTCTG |
| | GCGTGGGCAAGACCACCATCATCAAGAAGTACCTGAGCCAGAACAAGCGGGACAGCGAAGCTAGAGGCGACGTGGT |
| | GCCTGTGCTGCACATTGAGCTGCCCGACAATGCCAAGCCTGTGGATGCCGCTAGAGAACTGCTGCTGGAAATGCGGG |
| | ATCCCCTGGCTCTGTACGAGACAGACCTGGCCAGACTGACCAAGCGGCTGACCGATCTGATTCCTGTGACCGGCGTG |
| | AAGCTGATCATCATCGACGAGTTCCAGCACCTGGTGGAAGAACGGTCCAACCGGGTGCTGACCCAAGTCGGCAATTG |
| | GCTGAAGATGATCCTGAACCGGACCAAGTGTCCCATCGTGCTGTTCGGCATGCCCTACAGCAAGGTGGTGCTGAAGG |
| | CCAACTCTCAGCTGCACGGCAGATTCAGCATCCAGTTCGAGCTGCGGCCCTTCAACTACCAGAATGGCGAGGGCGTG |
| | TTCAAGACCTTCCTGGAACACCTGGACAAGGCCCTGCCTTTCGAGAAAGAAGTCGGCCTGGTTGAGCAGGGCCTGCA |
| | GAAGAAGCTGTACGCCTTCAGCCAGGGCAACATGCGGAGCCTGAGAAACCTGATCTACCAGGCCAGCGTGGAAGCC |
| | ATCGACAAGCAGCACGAGACAATCACCGAGCAGGACCTGATCTTCGCCAGCAAGCTGACCAGCGGCGACAAGAGCG |
| | ACAGATGGGAGAACCCCTTTGAGAAGGGCGTGAAAGTGACCGAGGGCATGCTGAGAAGCCCTCCAAAGGATATCGG |
| | CTGGGAAGATTACTACCACCACGTGACCAGCCTGAACGCCAAGAGAAACGGCGGCAACATGTTCGAGTGA |
| | (SEQ ID NO: 441) |
| tnsD | ATGCTGCTGCAGAGGCCTAAGCCTCACAGCAACGAGAGCCTGGAAAGCTTCTTCATCAGAGTGGCCAACAAGAACGG |
| | CTACGAGGACGTGAACAGATTCCTGATGGCCACCAAGAGATACCTGCAGGACATCGACTTCAGCGGCTTCCAGACAT |
| | TCCCCACCAACATCTGCAAGATCAACCCCGCCAGCGCCAAGTCTAGCAGCTCTGCCAGAATTGCCAGCCTGCTGAAA |
| | CTGGCCCAGCTGACCTTCAACGAGCCTCCTGATCTGCTGGGCCTCGCCATCAACAGGACCAACCTGAAGTACAGCCCT |
| | AGCACCAGCGCCGTGATCAGAGGCAGCGAAGTGTTCCCTAGAAGCCTGCTGCGGACCAAGTCTATCCCTTGCTGCCC |
| | TCTGTGCCTGCAGCAGAACGATTACGCCAGCTACCTGTGGCACTTCGAGGGCTACGATCACTGCCACATCCACGATGC |
| | CCCTCTGCTGAACAGCTGTAGATGTGGCGCCGAGTACGACTACAGAGTGTCTGGCCTGTCTGGCATGTGCGGCGAGT |
| | GCAAGAAAACCATCAGCACCAAGAGCAGCGAGAACAGCCACAAGGCCACCAGCACAGTGTCTAGCTGGCTGGCCGG |
| | CAACGAGTCCAAGGATCTGCCTGATGTGCCCAAGAGCTACAGATGGGGCCTGATCCATTGGTGGGTGCACATCAGCA |
| | AGAACGAGTTCGACCACGTGTCCTTCATCCAGTTCTTTAGCAAGTGGCCCTCCAGCTTCCACAGCATGATCGACAACG |
| | AGATCGAGTTCAACCTGGAACACGCCATCGTGGGCAGAAGAGAGCTGCGGATTAAGGACCTGCTGGGCAGAATCTTC |
| | TTCAGCAGCGTGCGGCTGCCCGAGAGAAATCTGCAGCACAACATCGTGCTGGGCGAGCTGCTGAGACACACCGAAAT |
| | GCACCTGTGGGACAACAACGGCCTGATCGCCAACCTGAGAATGAACGCCCTGGAAACCACCGTGTTTCTGAACTGCA |
| | GCAAGGACGAGCTGGCCTCCATGGTGGAACAGCGGATCCTGAAGCCTAACAGAAAGACCAAGCCAAACATGCCCCT |
| | GGCCGTGAACGACTACCTGTTCTACTTCGGCGACATCTTCTGCCTGTGGCTGGCTGAGTTCCAGACCGACGAGTTCAA |
| | TCGGAGCTTCTACGTGTCCCGGTGGTGA (SEQ ID NO: 442) |

[0127] 255403|0|GCA_004358445.1_ASM435844v1_genomic|CP037951.1|4222191|Par ashewanella (ID: 133)

TABLE 43

| Elements | Sequences |
|---|---|
| tnsA | ATGGCCAAGAAGCAGAAAAGACGGGACGTGCGGAAGCTGATGAGCAAGAGCGTGAACGTGTTCCACGGCAGAAAG |
| | AGCGAGGACTACCCCACCTACACAGAGAGCCCTCTGGAAGCCGATCTGTGCTACCACCTGGAATTCGACAAGAACGT |
| | GGTGTCCTACCAGGCTCAGCCCTTTCCTATCACCTACTTTTTCGACGGCAAGCTGCGGAGCTACACCCCTGACTTCAA |
| | AGTGACCTACCAGAACGGCAGCGTGGTGTACATCGAAGTGAAGTACGAGGCCGACAAGACCCGGATCGACAACTTC |
| | GAGCAGTGGATCGAGGCCATCAACCAGAGCCTGATCAGCCAGGGCAGCAGAGTGATCGTGATCACCGAGCTGTTCAT |
| | CCGGAAGCAGCCCACCTACGAGAACCTGGTCAACGTGTACAGCGCCACCAGACTGAAGCTGGACAAGGCCTTCCTGG |
| | TCAAGATCATCACCGCCTTCGAGAGCAAGAAGAACCTGACAATCGCCGAGCTGATCACCCAGGACAAGAGAGAGTA |
| | CGAGCTGGAACAGATCCACCGGCTGATCTTCGAGAGAAAGCTGATCGCCCCTATCAACATCGAGATCATCAGCACCA |
| | GCAGCGTGATCCAGCACAGCGGCGAGAGCTACGAGTGCTACATCTGA (SEQ ID NO: 443) |
| tnsB | ATGAGCGCCACCTACAACAACGAGGACTTCCTGCTGATCACCAACGACGACATCAGCCGGCAGTTCCAGATCCTGAG |
| | CTGCAATGCCAGAGCTGTGCGGCTGCTGGATATCGTGACAGGCGTGGAAAGCGAGCGGAAAGTGACCGAGCTGGAC |
| | GAGCTGATCGTGTCTGGAAATGCCGCCATCCAGAAGAAGGACACCCAGGCCAGAAAGCGGCTGAACCCCGAGAGCA |
| | GAGATTTCGGCAGCTACCCCGAGAAGTCCAAGTCTCAGGCCCGGGACAGACTGAAGATCGTGATGGGAGTGATCGAG |
| | GCCAAGCCTAAGAGCTTCAGCGCCAAGAGACTGGAACCCATCATCAGCAAGCTGTATAGCGAGTACACCTTCGAGAC |
| | ACTGAAGCGGAAGCCCAGCAGCAGATCCGTGATCCGGTGGATCCAGAGATTCAGCAGCAGCGGCCACAACATCAGA |
| | AGCCTGCTGCCTTTCGACGAGATGAAGGGCAACCGCGAGAACAAGGTGGACCCCAGAATCGAGCCTTACGTGGAAG |
| | CCGCCATCAAGCACTTCAAGAGCCCTGAGTGCCCCTCTATCGCCAAGAGCTACGATGAGCTGAAGAAACTGGTGTAC |
| | AGCAAGAACGCCGAGATCGTGGACGAGGCCAAAAAGATGAAGCCCATGCACTACAGCGCCTTCGTGAAGCGGCTGG |
| | AAAAAGAGGCCCCTAAAGAGCTGACCAAGGCCAGATTCGGCAAAGAGGCCGCCAGAAAACTGTTCCGGGAAGCCAA |
| | ACAGCCCCAAGAGATCAGCCTGATCCTGCAGCGCGTGGAAGTGGACCACACCAAGCTGGACCTGTTCATCGTGGATG |
| | AGAAGAACTTCCTGCCTCTGGGCAGACCCTGGGTCACAGCCCTGATCGACTACAAGAGCAAGAGCATCCTGGGCTTT |
| | CACATCGGCTTCGAGCCTCCAAGCTACCTGTCTATCGCTAGCGCCCTGAGACACGCCATCCTGCCTAAGTCCTACGTG |
| | AAAGAAAGATACCCCGAAGTGAACTGCGACTGGAATTGCTACGGCATCCCCAAGTCTATCGCCGTGGACAGAGGCAA |
| | GGACTTCGAGTCCAAGGCCTTCGAGGACGCCTGCATGGATCTGTTTATCCGGATCCACAGAAACCCCGGCAGACACG |
| | CCTGGTACAAGGGCAGCATCGAGAGCTACTTCAACACCCTGAACAAGAGGCTGCTGAACGACCTGAAAGGCAAGGT |
| | GTTCCCCAACATCGGCGAGAGCAACAACTACAACCCTCAGAAAAACGCCGTGATCAGCTTCGAGGTGTTCATGCGGG |
| | TGTTCCACATCTGGGTCATCGACATCTACCAGCAGAGCAAGGTGTCCAAGGGCACAATCATCCCCAGAGTGTCCTGG |
| | GAAGAGGACCTGGACGTTGTGACAAGAGGCGCCATCAACAGAGATGCCCTGGACATCATCCTGTGCGAGCACAAGA |
| | CCCGGATGAACAGCGAGAAGGGCATCGTGCTGAACCACATCTTCTACGACAACGAGCAGCTGTACAAGCTGAGGGCC |
| | CTGACCGGCATCAGAAAGGTGCACATCAAGTTCACCCGCGAGAATCTGGGCTTCGTGTGGGTGCAAGACGACCAGAA |
| | CAATCAAGAGAACGTGTTCTTCAAGGTGCCGGCCATCAACCAGAAGTACGCCAGCGGACTGAGACTGCACCAGCACG |
| | AAGTGATCAAGAACTTCTGCGACAAGATGCTGGACCTCGAGCTGAACGAGGAAAATCTGGCCCTGGCCAAGATCAAG |
| | ATGGAAAACCTGATCAGCGACTGGGTCGACACCGTGAACGCCAAGAAGGTGTCCTCTCTGCAGAAGGCCGCTCGGTA |
| | TTACGGCGTGGGACAGCAGAGTGATCAGACCGTGGTGTCCACCGTGACCAAGGACACCATCGAGAACCAGCTGATCT |
| | CCAGCAGCACCGCCACCGAGGAAAGACTGAAAAAGGGCGACGAGAACGAGAGCGGCTACGAGTTCTACGACGGCAA |
| | GAACAATCTGCTGCCCGACGAGCTGGAATTCTGA (SEQ ID NO: 444) |
| tnsC | ATGAGCAACGAGAGCGAGCTGTTCACCGAGCACCAGAAAAAGATCGTGAAGCAGATCAAGAACATCTTCGTGGCCA |
| | CCGACACACTGCAGCTGATCCTGGACGAGATGAAGGAAATCAGAGAGCTGAGCAAGATCGACGAGTACGAGAACCT |
| | GCCTGAGTGCATCTTCATCGGCGGCGAAACAGGCACAGGCAAGAGCCACTTCATCAAGCAGTACCAGAGAGAGTAC |
| | GACCGCTACGACCTGATCTCTCACCTGGGCGAGAGAACCATCGTGCCCGTGCTGTACTGCGAGCTGCCTAAGGCCAC |
| | ACATCCCAAGCCTGTGGTGTCCGAGCTGCTGGATGTTCTGGGCGATCCTCTGAAGGGACTGAAAGGGGATGTGCGGC |
| | AGCTGACCAGCAGACTGGTGCATCTGCTGAAAGAGAGCAAGACAGAGCTGCTGATCATCGACGAGCTGCAGCACGC |
| | CATCGAGAAGGCCAGCAATACCGTGATCCAGGACATCGGCGAGTGGTTCAAGATCCTGATCAACAAGTCTAAGATCC |
| | CGATCGCCTTCTTCGGCGAGCCTTGGGCTACAGCCGTGTTCGATGTGAACCCACAGCTGAGCAGACGGGTGTCCAAG |
| | CGGGATTTCGTGATCCCCAACTACACAGCCCTGACCTTCGACAAGTTCCAGATGTTCATCGAGAACCTCCAGAAGAA |
| | GCTGCCCATCAAGCCCGCTCAGGACCTGTTCGATGACGAGATGGCCTTCAAGCTGTTCGCCGCCAGCAGCGGCAATCT |
| | GAGCAATCTGGTCAAGGGCATCATCATGCCCGCCAGCATCAGCGCCCTTAAAGAAGGCGCCGATTGCTTCACCGAGG |
| | AACACATGAAGCTGGCCTTTAAGCAGAGAAAGAGCCTGAGCCAGAAAGCCAACTTCGTGATCAAGAATCCCTTCAAG |
| | AAGAAGATTGACGACATCGAAGGCTGGCAGCAGCTGACAAGCTCCCACTGGGACAACACCGCCAATACCAAGGCCG |
| | AGAGAATCATCCACGCCACCTACAGCAGGCTGAAGTTCAAGGACATCCCCGCCAACCAGATCCTGAGCAAGCGGTAA |
| | (SEQ ID NO: 445) |
| tnsD | ATGACCTTCCTGATCCGGAACCGGGTGTTCAAGGACGAGACACTGGAAAGCTACTTCATCCGGCTGGCCCACAGCAA |
| | CGGCTTCGAGAAGATCAACCTGTTCCTGAGCAGCCTGAACGCCTTCTTCATCGAGTACGACATCAAGCTGAAGGGCA |
| | TCCTGCCTACCGCTCTGTCCAGACTGAACCTGTACAAGGCCCACAACAGCAGCGCCTATAGAGTGCGGGCCATTAAG |
| | CTGCTGGAAGAGTTCTGCGACCTGCAGCCTAGCAGCCTGCTGAGAGTGTCCGTGCTGAGGACCAACAAGCACTTCGG |
| | CAGCTATGCCGCACTGGCCAGATCCAACGTGCTGTTCCCCAACATCATGCTGCGCGAGAAAGTGATCCCTGTGTGCCC |
| | CGAGTGCCTGCAAGAGAAGTCCTACATCCGGTTCATCTGGCACCTGAAGCCTATCCAGCACTGCCCCAAGCACCACG |
| | TGAAGCTGATCTTCAACTGCCCTGAGTGCGGCAACGATATCAACTACATCCAGAACGAGAACGTCGAGCTGTGCAGC |
| | TGCGGCTTCGACTTCAGACAGATCAAGCCTCCTAACAAGATCGAAGAGAGCATGAGCGCCAGCCTGTTCGAGAGCCC |
| | TGAGAATGCCGAACACCTGAGCCTGGAATTCGGCAAGTACCTGTGGTTCAGCAAGCGGAGCGGCGTGGAACTGGACG |
| | ATGAGTGCTTCCTGCTGAAGTTCAACCGGTACTTCAGCAACTGGCCCGACAACTACCTGAGCTACCTGAAAACCCAA |
| | GAGAGCAATGCCATCGAGAAGCAGACCAGCCGGTTCAACCAGATCAGCGTGAACGACATCTGGCGGGACCAGCTGC |
| | GGAATGTGAAGCTGTCCAGCACCGACAAAGTGAACAACCTGGTCCTGGAACAGCTGACCAATTACTTCATCGACCTC |
| | GTGCGGAGATACCCCAAGTGCGAGCATGCCAACGTGGCCGACACACTGATCAACCAGGTGGACTCTGCCCTGCTGCT |
| | GAGAACCTCTGTGGAACAGGTGTTCCGCCTGCTCGAGGACGGCTACCTGAGAGTGAAGTTTGGCGTGCCAACCGAGG |
| | CCATCTACAAGCCTCACATCCCCATCTTCTACCTGCGGGAAGTGATTGAGCTGGTGCAGGCCCAAGGCGCCAATACCA |
| | CCATGAGCAACCACATCATCAGCGCCTGGTGA (SEQ ID NO: 446) |

[0128] 256296|40|GCA_004378355.1_ASM437835v1_genomic|SNTB01000030.1|42089|Psychromonas (ID: 134)

TABLE 44

| Elements | Sequences |
|---|---|
| tnsA | ATGTACATCCGGAACCTGCGGAAGCCCTCTCCAAACAAGAACGTGTTCAAGTTCGCCAGCACCAAGATGGGCGAAGT |
| | GATCCTGTGCGAGAGCACCCTGGAATTCGACGCCTGCTTCCACCACGAGTACAACGACGAGATCGAGAGCTACGGCA |
| | GCCAGCCTCAGGGCTTTAAGTACGAGTTCAACGGCAAGGTGCTGCCCTACACACCCGACGCTCTGATCCTGTACAAG |
| | AACGGCGTGCACAAGTACCATGAGTACAAGCCCTACAGCAAGATCAGCAGCACCCTGTTCCGGGACAAGTTCGAGGC |
| | CAAGAGACAGACCAGCCTGACCATGGGCATCGACCTGATCCTGGTCACCGACCGGCAGATCAGAGTGAACCCCATCC |
| | TGAACAACCTGAAGCTGCTGCACAGATACAGCGGCGTGTACGGCGTGTCCAAGGTGCAGGTTGAGCTGCTGAAGATC |
| | ATCCGGTACAGCGAGACAATCAAGCTGAACGACGTGTCCAGCCAGTGCAACCTGAGCATCGGCGAGACAAGAAGCT |
| | TCATCTACGGCCTGATCCACAAGGGCTTTCTGAAGGCCGACCTGGGCAAAGAGGACCTGAGCAACAACCCCACACTG |
| | CGGGCTGTGTAA (SEQ ID NO: 447) |
| tnsB | ATGAGCGACTTCATCAACGAGTTCGACAACAGCATCGTGCCCATCAAGCCCGAGACACCCGACCAGTATGTGAAGCT |
| | GGAAGATGCCACACTGATCAAGCGCGACCTGGATACCTTTCCTGACTTCCTGAAGGACAAGGCCTTCGACAAGTACA |
| | AGCTGATCTCCATCATCGAGAAAGAGATCAGCGGCGGCTGGACCCAGAAGAACATCGACCCCATCCTGGAAAACCTG |
| | TTCGAGGAAAACAACGCCAAGAAGCCCAACTGGCGGACAGTCGTCAGATGGCGGAAGGCCTACATCGACAGCAACG |
| | GCGATCTGAGCAGCCTGGTGGTCAAGCAGCACAAGATGGGCAACCGCACCAAGAGAATCGACGGCGACGAGTTCTT |
| | CTTCGATAAGGCCCTGGAACGGTTCCTGGACGCCAAGAGGCCTAAAGTGACCACCGCCTACCAGTACTACAAGGACC |
| | TGATCATGATTGCCAACGAGAACGTGGTGGAAGGCGAGATCCCCGTGATCAGCTACAGCGCCTTCAACAAGCGGATC |
| | AAGAGCCTGCCTCCTTATCCTACCGCCATTGCCAGACACGGCAAGTTCAAGGCCGATCAGTGGTTCGCCTACTGCGGC |
| | TCTCACATCCCTCCAACCAGGATTCTGGAACGCGTGGAAATCGATCACACCCCTCTGGATCTGATCCTGCTGGACGAC |
| | GAGCTGCTGATCCCTATCGGCAGACCCTACCTGACACTGCTGGTGGATGTGTTCAGCGGCTGCATCCTGGGCTTCCAC |
| | CTGAGCTACAAGAGCCCCAGCTATGTGTCTGCCGCCAAGGCCATCTCTCACGCCATTAAGCCTAAGAGCCTCGAGCA |
| | CCTGTCTATCGCCCTGCAGAACGACTGGCCTTGCTACGGCAAGATCGAGAATCTGGTGGTGGACAACGGCGCCGAGT |
| | TTTGGAGCAAGTCTCTGGAACACGCCTGTCACGCCACCGGCATCAACATCCAGTACAACCCTGTGCGGAAGCCCTGG |
| | CTGAAGCCCTTCGTGGAAAGATTCTTCGGGATGATCAACCAGTGCTTCCTGAGCGAGATTCCCGGCAAGACCTTCAGC |
| | AACATCCTCGAAAAAGAAGAGTACAAGCCTGAGAAGGACGCCATCATGCGGTTCAGCACCTTTGTGGAAGAGTTTCA |
| | CCGGTGGATCGTGGACGTGTACCACCAGGATAGCAACAGCCGGGAAACCCGGGTGCCAATCAAGAGATGGCAGCAG |
| | GGCTTCGATGTGTACCCTCCACTGAAGATGAACGACGAAGAGGACGCCAGATTCAGCATCCTGATGCGGGTGTCCGA |
| | CACCAGAACACTGACCCGGAACGGCTTCAAGTTTGAGGAACTGATGTACGACAGCACAGCCCTGGCCGACTACCGGA |
| | AGCACTACCCTCAGACCAAAGAAAGCGTGAAGAAGATCATCAAGGTCGACCCCGACGACATCAGCAAGATCCACGT |
| | GTACCTGGAAGAACTGGAAAGCTATCTGGAAGTGCCCTGCACCGAGACAACCGGCTATTCTGATGGCCTGAGCCTGT |
| | ACGAGCACAAGACCATCAAGAAGATTAACCGCGAGATCATCCGCGAGAGCAAGGACTCTCTGGGACTCGCCAAAGC |
| | CAGAATGGCCATCCACGAGAGAATCAAGCAAGAGCAAGAGGTGTTCATCAAGTCCAAGACCAAGGCCAAGCTGACC |
| | GCCGTGAAGAAACAGGCCCAGATTGCCGACGTGTCCAACACAGGCAAGGGCAGCATCAAGGTGCCCGAGATCGAGA |
| | GCATCCAGCCTAAGCGGAGCAACATCTCCGACGTGCTGGATGACTGGGAAGATGAAGTGGAAGCCTTCGAGTGAC |
| | (SEQ ID NO: 448) |
| tnsC | ATGAACGACCTGACCGAGCTGCAGATCCAGCAGCTGAGAGACTTCAGCGACTGCATCGTGGTGCACCCTCAGATCAA |
| | GATCATCTTCGACGACTTCGATGAGCTGCGGTTCAACCGGAAGTTCCAGAGCGACCAGCAGTGCATGCTGCTGATCG |
| | GAGATACAGGCGTGGGCAAGAGCCACCTGATCAACCACTACAAGAAACGCGTGCTGGCCACACAGAACTACAGCAG |
| | AGGCACAATCCCCGTGCTGGTGTCCAGAATCTCCAGAGGCAAAGGCCTGGAAGCCACACTGATCCAGATGCTGGCTG |
| | ACCTGGAACTGTTCGGCAGCAGCCAGATTAAGAAGCGGGGCTACAAGATCGACCTCACCAAGAAACTGGTGGAAAA |
| | CCTGATTAAGGCCCAGGTGGAACTGCTGATCATCAACGAGTTCCAAGAGCTGATCGAGTTCAAGTCCGTGCAAGAGC |
| | GGCAGCTGATCGCCAACGGCCTGAAGTTCATCAGCGAAGAGGCCAAGGTGCCCATCGTGCTCGTTGGAATGCCTTGG |
| | GCCGAGAGAATCGCCGAGGAACCTCAGTGGGCCAGCAGACTGATCCGGAAGAGACAGCTGGAATACTTCAGCCTGA |
| | AGAACAACAGCAAGTACTTCCGGCAGTACCTGATGGGCCTCGCCAAGAAGATGCCCTTCGACGAGCCTCCTAAGCTG |
| | AAAGTGAAGCACACCACACTGGCCATCTTCTCCGCCTGCAAGGGCGAGAATCGGGCCCTGAAACATCTGCTGACAGA |
| | GGCCCTTAAGCAGGCCCTGAGCTGCAATGAGCACCTGGAAAACAAGCACTTCGTGTTCGCCTTCGACAAGCTGTACC |
| | TGAGCGACACCTCCAGCTTCTCCCAGCAGAAGCTGACCATCAAGAACCCCTTCAAGCAGGACATCAAGGATATCAAG |
| | ATCTACGAGGTGTCCAAGAACAGCAGCTACAACCCCAACGCCATCGATCCCGAGGATGCCCTGACAGGCAGAGAGTT |
| | TAGCCTGATCGCCTGA (SEQ ID NO: 449) |
| tnsD | ATGGCCTTCCTGTTCAGCCCTAAGGCCACACCTTTCAGCGACGAGAGCCTGGAAAGCTACCTGCTGAGAATCGTGTCC |
| | GAGAACTTCTTCGACAGCTACGAGGAACTGAGCCTGGCCATCAGAGAGGAACTGCACGAGCTGGATTTTGAGGCCCA |
| | CGGCGCCTTTCCAATCGACCTGAAGAGACTGAACGTGTACCACGCCAAGCACAACAGCCACTTCCGGATCAGAGCCC |
| | TGGGACTGCTGGAAGCTCTGCTGGACCTGCCTAGATTCGAGCTGCAGAAGATCGCCCTGCTGAAGTCCGACGTGACC |
| | TTCAATAGCAGCGCCGCTCTGTACCGGAACGGCGTGGACATCCCTCAGAAGTTCATCAGATACCAGGGCAACAGAAA |
| | GGCCTACAGCATCCCCATCTGTCCCCACTGCCTGAGAGAGGAAGCCTACATCAAGCAGAGCTGGCACATCGAGTGGG |
| | TCAACATCTGCGTGAAGCACCAGTGCACCCTGATCCACAACTGCCCCGAGTGCAACCTGCCTATCAACTACATCGAG |
| | AACGAGAGCATCACCCACTGCAGCTGCGGATTTGAACTGGCCAGCGCCGATAGCCTGCCTGTGAAAGAGAAGTCCAT |
| | CAAGTACCTGCATGCCCTGCTGGACAGCAATATCTGCAGCGGCAGCAACCCTCTGTTCAACTTCACCACCAGCAGCG |
| | ACAGATTCGCCGCACTGCTGTGGTTCCACAAGCGGTACAGCCACAAGAACGTGTTCTGCCTGGACGAGGCCGTGGAA |
| | TACTTCTCTGAATGGCCCGCCAGCTTCTACAAAGAGCTGAACGGCCTGACCAACAACGCCGAGATGAAGCTGATCGA |
| | CCTGTTCAACAAGACCGAGTTCCGGTTCATCTTCGAGGACCTGATCCTGAGCAGCCCCAACACACAGATCCTGGAAA |
| | AGCCCCACTTCATCCTGATCACACTGCTGGACTACCTGGCCGCTCTGATCGAGGAAAACCCCAAGAGCAAGAAGGCC |
| | AACATCGGCGACCTGCTGGTGTCCGTGTCTGAAACAGCACTGCTGCTGGGCACCAGCATCGACCAGGTGTACAGACT |
| | GTACCAGGACGGCATCTTCCAGACCGCCTTCCGGCTGAAGCTGAACCAGAGAATCAACCCCAACAAGGGCGTGTTCT |
| | TCCTGCGGCAAGTGATCGAGTACAAGGCCAGCTTCGGCAACGACAAGAACCGTATGTACGTGTCCGCCTGGTGA |
| | (SEQ ID NO: 450) |

[0129] 264788|117|GCA_005146805.1_ASM514680v1_genomic|SYVQ01000076.1|757 05|Vibrio (ID: 135)

TABLE 45

| Elements | Sequences |
|---|---|
| tnsA | ATGCGGACCATGTTCGACCAGACCAAGAAAAGCAGCCACGTGCACAACATCTGCAAGTTCATGAGCCTGAAGAACG |
| | ACGCCGTCGTGCGGACACTGAGCGTGCTGGAATTCGACTTCTGCTTCCACCTCGAGTACAACCCCGACGTGAAGCGGT |
| | ACATCTCTCAGCCCCACGGCTTCTACTACTACTTCAACGGCCGGAAGTGCCGGTACACCCCTGACTTTCTGGCCGACG |
| | ACCACAAGGATCAGAGCACCCTGATCGAGATCAAGCACAGCAGCCAGATCCTGAAGCCTGACTTCCGGCAGAGATTC |
| | GCCGAGAAGCAGAGAGTGGCCCTGGAAGAACAGGGCAAGAGACTGGTGCTGGTCACCGAGAAACAGATCAGAATCG |
| | ACCCCATCTTCAGCAACCTGAAGCTGCTGCACAGATACAGCGGCCTGCACACCGTGACCAAGGTGCAGAAATCCGTG |
| | CTGGGCTTCATCCAGAGAAAGCAGAAGGTGCAGCTGAGAGAGGTGTCCGAGTACCTGGGACTGAGCGAGCACGAGA |
| | CACTGATCAGCACCCTGTGCTGGCTGTCTAGCGGAAGAGTGCGGACCGACATCAGAAGCAGCGACTTCGGCCTGAAC |
| | AGCTACGTGTGGTGCTGA (SEQ ID NO: 451) |
| tnsB | ATGGCCAGCGACTTCGACGATGTGTTCGGCTTCATCGACGAGATGGAAGCCAGCGCTCAAGAGGCCGAGCTGGCCAC |
| | AAAACTGCCCAGGGATCTGTTCGAAGAGGACACCAGCTACCTGCCTACCATCGACACATTCCCCGAGAAAACCCAGA |
| | AAGAGGTGTTCCGGCGGCTGAAAGTGATCCAGTTCACCGAGAAGAGACTGAAAGGCGGCTGGACAGAGAAGAACCT |
| | GGTGCCTATCCTGAACCAGGTGGAACAAGAGCTGGCCCTGTCTCCTCCATCTTGGAGAGTGCTGGCCGAGTGGAAGA |
| | AGGTGTACTTTGAGAGCGGCCGGTCTATCCACAGCCTGGTGCCAGCTCATGCCCAGAAGGGCAACAGAAACCAGCAC |
| | ACCGATAGCCAGCTGCTGATCGACGAGGCCATCAACAAGAAGTACCTGACCAAAGAACGGCTGAGCGTGGCCGAGG |
| | CCTACCGGTACTATAAGAGCAGAGTGATCAAGACCAATCAAGAGATCGTCGAGGGCAAGATCAAGCTGATCAAAGA |
| | GCGGAGCTTCTACAACAGAGTGAAGGGCCTGCCTCCTTACGACGTGGCCGTGGCCAGATACGGCAAGAGATACGCCG |
| | ACCGCGAGTTCAGACCAGTGGGACAGCAGATCGAGGCCACCAAGCCTATGGAATACGTGGAAATCGATCACACCCCT |
| | GTGCCTGTGATCCTGATCGATGACGAGCTGGACATCCCTCTGGGCAGACCCTACCTGACAATGCTGTACGACCGGTTC |
| | AGCAAGTGCATCGTGGGCTTCAGCATCAACTTCAGAGAGCCCAGCTTCGACAGCGTGCGGAAAGCCCTGCTGAGCAC |
| | CCTGCTGGAAAAGAATTGGATCAAGGACAAGTTCCCCAGCATCACCAACGACTGGCCTTGCCACGGCAAGATCGACT |
| | ACCTGGTGGTGGATAACGGCGCCGAGTTTTGGACACCCAGCCTGGAAGATAGCCTGCGGCCTCTGGTGTCCGACATC |
| | CACTATTCTCAGGCCGCCAAACCTTGGAGAAAGACCGGCATCGAGAAGCTGTTCGACCAGCTGAACAAGGGCCTCGT |
| | GAATGCCCTGCCTGGCAAGACCTTCACAAACCCCACACAGCTGAAGGACTACGACCCCAAGAAAGAAAGCGCCGTG |
| | CGGGTGTCCGTGTTCATGGAACTGATCCACAAATGGGTCATCGACCGCTACCACATGGACAGCGACAGCCGGGAAAG |
| | ACACGTGCCCTACCACAAGTGGAAAGAATCCAAGTGGCTGCCCAACTTCTACCAGGGCAAAGCCGCCGCTGACCTGA |
| | GAATTGAACTGGGCCTGCTGCGGCACAGAACCATCGGAACAGCCGGAATCAGACTGCACAACCTGTGCTACCAGAGC |
| | GAGGAACTGATTGAGTACCGGAAGTACAACTCCGTGAACAGCCAGGGCAAGCTGTACGTGCGGACCAAGACCGATC |
| | CTAGCGACATCAGCGCTATCTACGTGTTCCTGGAAAGCGAGAAGCGGTACATCAAGGTGCCCGCCGTGGACAATAGC |
| | GGCTACACAAATGGCCTGAGCCTGTTCGAGCACGAGCGGATTCAGAGAGTGCGGAGACTGAACACCAGAAGCCTGG |
| | TCAACGAGGAAAGCCTGGCCGACACCTACCTGTACATGGAAGCCCTGATTGAGGGCGAAGCCGAGCGGATGAGAAA |
| | GAGCAGAAACAAGAAGCTGACCCAGCCTAAGACAGGCAACACCAGCAAGATCGCCAAGTACCGCGACGTGGGCACA |
| | GAAGGCCCTGGCTCTATCGTGAAGAAGAAGGACAACTCCAACACAGCCCTGAACGTGGTGTCTACCCAGCTGAGCCT |
| | GGACGACGATGATGACCTGGCCGATATCGAGGGCTACTGA (SEQ ID NO: 452) |
| tnsC | ATGGTCAACCTGACCAGCATGCAGCACGAGCAGCTGAAGGCCTACGACAACTGCTTCATCGAGTACCCCGAGATCAC |
| | CGAGATCTACAGCATCTTCGACCAGCTGCGGTTCAACCAGTCTCTCGGCGGAGAGCCTGAGAGCTTTCTGCTGACTGG |
| | CGAGACAGGCTCTGGCAAGACAGCCCTGATCAACAACTACCTGAAGAGATTCGAGGCCAGCAGCCGGTCCAGCTGGT |
| | CTACACAGACAGTGCTGAGCACACGGATCCCCAGCAGAGTGAATGAGCAGTCTACCCTGAACCAGTTCCTGGTGGAC |
| | CTGAACAGCAAGAGCGGCGGCAGAAGCACCAGAAGGCGGAACGAAATTGCCCTGGGCGAGTCTGTTGTGCGGCACC |
| | TGAAACGGAAGTCCGTGGAACTGATCATCGTGAACGAGATCCAAGAGCTGGTGGAATTCAGCAACGCCGACGAGAG |
| | ACAGACAATCGCCAACACCTTCAAGTACATCAGCGAGGAATCCGGCGTGTCCTTCGTGCTCGTGGGAATGCCTTACG |
| | CCGACGTGATCGCCAATGAGAGCCAGTGGAACAGCAGACTGAGCTGGCGGAGAGAGATCAACTACTTCACCCTGTTC |
| | AAGGACGACAGAGGCCCCAAGGACACTGGCCCCAAGTACAGAATTGACGCCGTGCAGAAAAAGCACTTCGCCATGT |
| | TTGTGGCCGGCCTGGCCAGCAGAATGGGCTACGAAAACAAGCCCCTGCTGACCAACAACGAGATTCTGTACCCTCTG |
| | TTCAGCATGTGCAGAGGCGAGTGCAGACGGCTGAAGCACTTCCTGAAGGACGCCATGCTGATGAGCTTCAAAGAGGA |
| | CAAGAACACCATGGACAAAGAGGTGCTGTCCAGCACATTCGCCCTGAAGTTCCCCAGCCTGGACAACCCTTTCGAGT |
| | GCTCCCTGGACAAGCTGGAACTGGACCAGATCGATATCGGCAGCGCCTACAACACCAGAGCCATCACCGCCGAGGAT |
| | AAGATTCTGGCCCCTCGGTTTACCGACGCCATTCCTCTGAGCATCCTGCTGAGCAAGTCCGGCCTGAAAGTGTGA |
| | (SEQ ID NO: 453) |
| tnsD | ATGAACACCGACATCCAGCTGTACCCCGACGAGAGCCTGGAAAGCTTCCTGCTGAGACTGAGCCAAGAGCAGGGCTA |
| | CGAGCGGTTCTCTCACTTCGCCGAGGACATTTGGTTCGACACCATGGACCAGCACGAGGCCATTGCCGGCGCTTTTCC |
| | ACTGGAACTGAACCGCGTGAACATCTATCACGCCCAGACCACCAGCCAGATGAGAGTGCGGGTGCTGATCCACCTGG |
| | AAAACCAGCTGAAGCTGAACAACTTCGGCGTGCTGAGGCTGGCCCTGTCTCACTCTAAAGCCCAGCTGAGCCCTCAG |
| | TACAAGGCCGTGCACAGATTCGGCGTGGACTACCCTTACGCCTTCCTGCGGAAGCGGTTTACCCCTATCTGCCCTCTG |
| | TGCATCAACGAGGCCCCTTACATCCACCAGCAGTGGCAGTTCATTAGCCACCAGGCCTGTGAACACCACGGCTGCAA |
| | GCTGACACACCACTGTCCTGAGTGCAGCAGCAGACTGGAATACCAGAGCACCGAGAGCATCGGCCAGTGCGAGTGTG |
| | GCTATGAGCTGAGAAACAGCCCCGTGGACGATGCCCCTGAAGCCGAAACACTGGTGGCCAGATGGCTGAGCGGCAA |
| | CGATTCTAAGCCTCTGGGACTGCTGAAGGCCGAGATGACAATCCCCGAGAGATACGGCTTTCTGCTTTGGTACGTGAA |
| | CCGCTACGGCGACATCGACGACCTGAGCTTCGAGAGCTTCATCGAGTACTGCTGCGCCTGGCCTACAGCTCTGTGGCA |
| | GGATCTGGATGCCCTGAAAGAAAAGGCCGAACTCGTGCGGATCAAGGACTGGAAGAAGGTGTTCTTTAACGAGGCCT |
| | TCGGCGCCCTGCTGAAAGACTGTAGACAGCTGCCTAGCCGCCAGCTGTCCCACAATATCGTGCTGGCTCAGGTGCTGG |
| | CCTACTTCACCAAGCTGATGGCCACAGTGCCTAGCAGCGCCAAGGGCAACATTGGAGATGTGCTGCTGAGCCCACTG |
| | GAAGCCAGCACACTGCTGAGCTGCACCACCGATGAGGTGTACCGGCTGTACGAGTTTGGCGAGATCAAGGCCGCCAT |
| | CAGACCCCGGATGCACACAAAGATTGCCAGCCACGAGAGCGCCTTCACACTGAGAAGCGTGATCGAGACAAAGCTG |
| | ACCCGGATGAGCAGCGAGTCCGATGGCCTGTCTGTGTACCTGCCTGAGTGGTGA (SEQ ID NO: 454) |

TABLE 46

| | |
|---|---|
| Trans- | MYMRNETPITPDNLETESVTAKDTQIIVSELSDEAKLKMEIIQSLLEAGDRTTYAQRLKEAAVKLGKSVRTVRRLIDKW |
| posase | EQEGLVGLTQTDRVDKGKHRVDENWQEFILKTYKEGNKGGKRMTRQQVAIRVKVRADQLGVKPPSHMTVYRILEPV |
| | IEKQEKAKSIRTPGWRGSRLSLKTRDGLDLSVEYSNHIWQCDHTRADILLVDQHGELLARPWLTTVIDTYSRCIIGINLG |
| | FDAPSSQVVALALRHAILPKKYGAEYGLHEEWGTYGKPEHFFTDGGKDFRSNHLQQIGVQLGFACHLRDCPSEGGIVE |
| | RPFGTLNTDLFSTLPGYTGSNVQERPEEAEKEACLTLRELERLLVRYLVDKYNQSIDARLGDQTRYQRWEAGLIVAPN |
| | LISEEDLRICLMKQTRRSIYRGGYLQFENLTYRGENLAGYAGESVVLRFDPKDITTILVYRQTGFQEEFLARAYAQDLE |
| | TEELSLDEAKAMSRRIRQAGKEISNRSILAEVRDRETFVKQKKTKKERQKEEQVVVEKASSERSRTAKKPVIVEPEEIEV |
| | ASVESSSDTDMPEVFDYEQMREDYGW (SEQ ID NO: 455) |
| TnsB | MISQQAQGVAQELGDILPNDEKLQAEIHRLNRKSFIPLEQVKMLHDWLDGKRQSRQSGRVLGESRTGKTMGCDAYRL |
| | RHKPKQEPGKPPTVPVAYIQIPQECSAKELFAAIIEHLKYQMTKGTVAEIRDRTLRVLKGCGVEMLIIDEADRFKPKTFA |
| | EVRDIFDKLEIAVILVGTDRLDAVIKRDEQVYNRFRACHRFGKFSGEDFKRTVEIWERQVLKLPVASNLSGKAMLKTL |
| | GEATGGYIGLLDMILRESAIRALKKGLSKIDLETLKEVTAEYK (SEQ ID NO: 456) |
| TniQ | MEVGEINPWLFQVEPFEGESISHFLGRFRRANDLTTTGLGKAAGVGGAISRWEKFRFNPPPSRQQLEALAKVVGVDAD |
| | RLARMLPPAGVGMNLEPIRLCAACYVESPCHRIEWQFKVTQGCEDHHLSLLSECPNCGARFKVPALWVDGWCLRCFT |
| | LFGEMVKSQNFIESHNKI (SEQ ID NO: 457) |

### Programmable DNA-Binding Proteins

[0130] The nucleotide-binding proteins may be programmable DNA-binding proteins. A programmable DNA-binding protein may be designed or complexed with other molecule (e.g., a guide RNA) so that it is capable of binding to a desired target polynucleotide. Examples of programmable DNA-binding proteins include transcription activator-like effectors, Zinc Finger proteins, meganucleases, IscB proteins, a Cas proteins, or a complex of Cas proteins.

### CRISPR-Cas Systems

[0131] The nucleotide-binding protein may comprise one or more components of a CRISPR-Cas system. The one or more components of the CRISPR-Cas system (e.g., Cas protein or mutated form thereof) may serve as the nucleotide-binding component in the compositions. In one example embodiment, the transposon component includes, associates with, or forms a complex with a CRISPR-Cas complex. In one example embodiment, the CRISPR-Cas component directs the transposon component and/or transposition protein(s) to a target insertion site where the transposon component directs insertion of the donor sequence into a target nucleic acid sequence.

[0132] The nucleotide binding composition may comprise a Cas protein, a fragment thereof, or a mutated form thereof. The Cas protein may have reduced or no nuclease activity. For example, the DNA binding domain may be an catalytically inactive or dead Cas protein (dCas). In some cases, the Cas protein may have nickase activity. The catalytically inactive or dead Cas protein may have no nuclease activity or nickase activity.

[0133] A transposition protein may interact with a Cas protein or dCas protein herein. In some examples, the transposition protein interacts with the N-terminus of the Cas protein. In certain examples, the transposition protein interacts with the C-terminus of the Cas protein. In certain examples, the transposase or transposase complex interacts with a fragment of the Cas protein between its N-terminus and C-terminus.

[0134] In certain embodiments, the composition may comprise more than one Cas protein, one or more of which is mutated and/or in a dead form. In certain cases, one of the Cas proteins or a fragment thereof may serve as a transposition protein-interacting domain. In a particular example, the composition comprises dCas9, and one or more transposition proteins (e.g., Tn7 transposition proteins).

[0135] The CRISPR-Cas systems herein may comprise a Cas protein (used interchangeably with CRISPR protein, CRISPR enzyme, Cas effector, CRISPR-Cas protein, CRISPR-Cas enzyme) and a guide molecule. Non-limiting examples of Cas proteins include Cas1, Cas1B, Cast, Cas3, Cas4, Cas5, Cas6, Cas7, Cas8, Cas10, Csy1, Csy2, Csy3, Cse1, Cse2, Csc1, Csc2, Csa5, Csn2, Csm2, Csm3, Csm4, Csm5, Csm6, Cmr1, Cmr3, Cmr4, Cmr5, Cmr6, Csb1, Csb2, Csb3, Csx17, Csx14, Csx16, CsaX, Csx3, Csx1, Csx15, Csf1, Csf2, Csf3, Csf4, Cas9, Cas12 (e.g., Cas12a, Cas12b, Cas12c, Cas12d, Cas12k, etc.), Cas13 (e.g., Cas13a, Cas13b (such as Cas13b-t1, Cas13b-t2, Cas13b-t3), Cas13c, Cas13d, etc.), Cas14, CasX, CasY, or an engineered form of the Cas protein (e.g., an invective, dead form, a nickase form). In some examples, the CRISPR-Cas system is nuclease-deficient.

[0136] In some cases, the Cas protein may be orthologs or homologs of the above mentioned Cas proteins. The terms “ortholog” and “homolog” are well known in the art. By means of further guidance, a “homologue” of a protein as used herein is a protein of the same species which performs the same or a similar function as the protein it is a homolog of. Homologous proteins may but need not be structurally related, or are only partially structurally related. An “ortholog” of a protein as used herein is a protein of a different species which performs the same or a similar function as the protein it is an ortholog of. Orthologous proteins may but need not be structurally related, or are only partially structurally related.

[0137] Examples of Cas proteins that may be used with the compositions disclosed herein include Cas proteins of Class 1 and Class 2 CRISPR-Cas systems.

### Class I CRISPR-Cas Systems

[0138] In one example embodiment, the CRISPR-Cas system is a Class 1 CRISPR-Cas system, e.g., a Class 1 type I CRISPR-Cas system. In some cases, a Class I CRISPR-Cas system comprises Cascade (a multimeric complex consisting of three to five proteins that processes crRNA arrays), Cas3 (a protein with nuclease, helicase, and exonuclease activity that is responsible for degradation of the target DNA), and crRNA (stabilizes Cascade complex and directs Cascade and Cas3 to DNA target). A Class 1 CRISPR-Cas system may be of a subtype, e.g., Type I-A, Type I-B, Type I-C, Type I-D, Type I-E, Type I-F, Type I-U, Type III-A, Type Type-III-C, Type-III-D, or Type-IV CRISPR-Cas system.

[0139] The Class 1 Type I CRISPR Cas system may be used to catalyze RNA-guided integration of mobile genetic elements into a target nucleic acid (e.g., genomic DNA). For example, the compositions herein may comprise a complex between Cascade and a transposon protein (e.g., a Tn7 transposon protein such as TniQ). At a given distance downstream of a target nucleic acid, a donor nucleic acid (e.g., DNA) may be inserted. The insertion may be in one of two possible orientations. The composition may be used to integrate a nucleic acid sequence of desired length. In some examples, the Type I CRISPR-Cas system is nuclease-deficient. In some examples, the Type I CRISPR-Cas system is Type I-F CRISPR-Cas system, for example one of the Type I-F systems from Tables 7-45.

[0140] A Class 1 Type I-A CRISPR-Cas system may comprise a complex of multiple Cas proteins, e.g., Cas Cascade. In one example embodiment, a Class 1 Type I-A CRISPR-Cas system may comprise Cas7 (Csa2), Cas8a1 (Csx13), Cas8a2 (Csx9), Cas5, Csa5, Cas6a, Cas3′ and/or Cas3. A Type I-B CRISPR-Cas system may comprise Cas6b, Cas8b (Csh1), Cas7 (Csh2) and/or Cas5. A Type I-C CRISPR-Cas system may comprise Cas5d, Cas8c (Csd1), and/or Cas7 (Csd2). A Type I-D CRISPR-Cas system may comprise Cas10d (Csc3), Csc2, Csc1, and/or Cas6d. A Type I-E CRISPR-Cas system may comprise Cse1 (CasA), Cse2 (CasB), Cas7 (CasC), Cas5 (CasD) and/or Cas6e (CasE). A Type I-F CRISPR-Cas system may comprise Cys1, Cys2, Cas7 (Cys3) and/or Cas6f (Csy4). An example Type I-F CRISPR-Cas system may include a DNA-targeting complex Cascade (also known as Csy complex) which is encoded by three genes: cas6, cas7, and a natural cas8-cas5 fusion (hereafter referred to simply as cas8). The Type I-F CRISPR-Cas system may further comprise a native CRISPR array, comprising four repeat and three spacer sequences, encodes distinct mature CRISPR RNAs (crRNAs), which we also refer to as guide RNAs. In some examples, the Type I-F CRISPR-Cas system may associate with one or more components of a transposon of Vibrio Cholerae Tn6677 described herein. In certain embodiments, the transposases may be one or more Vibrio cholerae Tn6677 transposases. In one example, the system may comprise components of variant Type I-F CRISPR-Cas system or polynucleotide(s) encoding thereof. The transposon may include a terminal operon comprising the tnsA, tnsB, and tnsC genes. The transposon may further comprise a tniQ gene. The tniQ gene may be encoded within the cas rather than tns operon. In certain embodiments, the TnsE may be absent in the transposon.

[0141] Examples of Type I CRISPR components include those described in Makarova et al., Annotation and Classification of CRISPR-Cas systems, Methods Mol Biol. 2015; 1311: 47-75.

[0142] The associated Class 1 Type I CRISPR system may comprise cas5f, cas6f, cas7f, cas8f, along with a CRISPR array. In some cases, the Type I CRISPR-Cas system comprises one or more of cas5f, cas6f, cas7f, and cas8f. For example, the Type I CRISPR-Cas system comprises cas5f, cas6f, cas7f, and cas8f. In certain cases, the Type I CRISPR-Cas system comprises one or more of cas8f-cas5f, cas6f and cas7f. For example, the Type I CRISPR-Cas system comprises cas8f-cas5f, cas6f and cas7f. As used herein, the term Cas5678f refers to a complex comprising cas5f, cas6f, cas7f, and cas8f.

### Class 2 CRISPR-Cas Systems

[0143] In one example embodiment, the CRISPR-Cas system may be a Class 2 CRISPR-Cas system. A Class 2 CRISPR-Cas system may be of a subtype, e.g., Type II-A, Type II-B, Type II-C, Type V-A, Type V-B, Type V-C, Type V-U, Type VI-A, Type VI-B, or Type VI-C CRISPR-Cas system. The definition and exemplary members of the CRISPR-Cas system include those described in Kira S. Makarova and Eugene V. Koonin, Annotation and Classification of CRISPR-Cas systems, Methods Mol Biol. 2015; 1311: 47-75; and Sergey Shmakov et al., Diversity and evolution of class 2 CRISPR-Cas systems, Nat Rev Microbiol. 2017 March; 15(3): 169-182; and Makarova et al. “Evolutionary classification of CRISPR-Cas systems: a burst of class 2 and derived variants” Nature Reviews Microbiology, 18:67-81 (February 2020), which are incorporated by reference herein in their entireties.

[0144] In some examples, the Cas protein comprises at least one RuvC and at least one HNH domain. In some examples, the Cas comprises at least one RuvC domain but does not comprise an HNH domain.

[0145] In one example embodiment, the Cas protein may be a Cas protein of a Class 2, Type II CRISPR-Cas system (a Type II Cas protein). In one example embodiment, the Cas protein may be a class 2 Type II Cas protein, e.g., Cas9. By “Cas9 (CRISPR associated protein 9)” is meant a polypeptide or fragment thereof having at least about 85% amino acid identity to NCBI Accession No. NP 269215 and having RNA binding activity, DNA binding activity, and/or DNA cleavage activity (e.g., endonuclease or nickase activity). “Cas9 function” can be defined by any of a number of assays including, but not limited to, fluorescence polarization-based nucleic acid bind assays, fluorescence polarization-based strand invasion assays, transcription assays, EGFP disruption assays, DNA cleavage assays, and/or Surveyor assays, for example, as described herein. By “Cas 9 nucleic acid molecule” is meant a polynucleotide encoding a Cas9 polypeptide or fragment thereof. An exemplary Cas9 nucleic acid molecule sequence is provided at NCBI Accession No. NC_002737. In one example embodiment, disclosed herein are inhibitors of Cas9, e.g., naturally occurring Cas9 in S. pyogenes (SpCas9) or S. aureus (SaCas9), or variants thereof. Cas9 recognizes foreign DNA using Protospacer Adjacent Motif (PAM) sequence and the base pairing of the target DNA by the guide RNA (gRNA). The relative ease of inducing targeted strand breaks at any genomic loci by Cas9 has enabled efficient genome editing in multiple cell types and organisms. Cas9 derivatives can also be used as transcriptional activators/repressors.

[0146] The Class 2 Type II Cas protein may be a mutated Cas protein compared to a wildtype counterpart. The mutated Cas protein may be mutated Cas9. The mutated Cas9 may be Cas9^{D10A}. Other examples of mutations in Cas9 include H820A, D839A, H840A, N863A, or any combination thereof, e.g.,D10A/H820A, D10A, D 10A/D839A/H840A, and D10A/D839A/H840A/N863A. The mutations described here are with reference to SpCas9 and also include an analogous mutation in a CRISPR protein other than SpCas9.

### Dead Cas

[0147] In some cases, the Cas protein lacks nuclease activity. Such Cas protein may be a naturally existing Cas protein that does not have nuclease activity or the Cas protein may be an engineered Cas protein with mutations or truncations that reduce or eliminate nuclease activity.

[0148] The Class 2 Type II Cas protein may be a mutated or modified Cas protein compared to a wild-type counterpart. The mutated Cas protein may be a mutated Cas9. The mutated Cas9 may be Cas9 (e.g., D10A). Other examples of mutations in Cas9 include H820A, D839A, H840A, N863A, or any combination thereof, e.g., D10A/H820A, D10A, D10A/D839A/H840A, and D10A/D839A41840A/N863A. The mutations described here are with reference to SpCas9 and also include an analogous mutation in a CRISPR protein other than SpCas9.

[0149] The Class 2 Type V Cas protein may be a mutated or modified Cas polypeptide nuclease and may be catalytically inactive (also referred as dead). Exemplary modified Type V Cas proteins may be catalytically inactive Cas12a or Cas12b. As used herein, a catalytically inactive or dead nuclease may have reduced or no nuclease activity compared to a wild-type counterpart nuclease. In some cases, a catalytically inactive or dead nuclease may have nickase activity. In some cases, a catalytically inactive or dead nuclease may not have nickase activity. Such a catalytically inactive or dead nuclease may not make either a double-strand or single-strand break on a target polynucleotide, but may still bind or otherwise form complex with the target polynucleotide.

[0150] In an embodiment, the Cas12 protein (e.g., Cas12a or Cas12b) comprises one or more mutations in the RuvC (e.g., RuvC-II) domain of the polypeptide. In an embodiment, the mutation(s) of a catalytic RuvC domain residue abolishes the nucleolytic activity on the non-target DNA strand. In an embodiment, mutation at the RuvC domain abolishes all nucleolytic activity, providing a dead Cas12b polypeptide (dCas12b).

[0151] In some cases, the Cas protein may have a nickase activity. In some examples, the compositions may comprise a Cas protein with nickase activity. In certain examples, the compositions may comprise two Cas proteins with nickase activity. The two case proteins may function in pairs to make two or more single-strand breaks on a target polynucleotide.

[0152] In some cases, the Cas protein does not have either nuclease activity or nickase activity. For example, a catalytically inactive Cas protein may not have either nuclease activity or nickase activity. Such catalytically inactive Cas protein may function as a nucleotide-binding protein to guide other molecules associated with it (e.g., transposition protein(s) to the catalytically inactive Cas protein) to target specific polynucleotide sequence(s).

[0153] In one example embodiment, the CRISPR-Cas protein is a Cas9 or Cas9-like protein. In one example embodiment, the Cas9-like protein is a sub-type V-U protein (where the ‘II’ stands for ‘uncharacterized’), and share two features that distinguish them from type II and type V effectors that are found at CRISPR-cas loci that contain Cas1. First, these proteins are much smaller than class 2 effectors that contain Cas1, comprising between −500 amino acids (only slightly larger than the typical size of TnpB) and ˜700 amino acids (between the size of TnpB and the typical size of the bona fide class 2 effectors). Second, these putative effectors show a higher level of similarity to TnpB proteins than the larger type I and type V effectors. (Shmakov, S. et al., 2017, Nat. Rev. Microbiol., 15:169) One variant (subtype V-U5), which is found in various cyanobacteria, consists of diverged TnpB homologues that have several mutations in the catalytic motifs of their RuvC-like domain.

[0154] In general, a CRISPR-Cas or CRISPR system as used herein and in documents, such as WO 2014/093622 (PCT/US2013/074667), refers collectively to transcripts and other elements involved in the expression of or directing the activity of CRISPR-associated (“Cas”) genes, including sequences encoding a Cas gene, a tracr (trans-activating CRISPR) sequence (e.g. tracrRNA or an active partial tracrRNA), a tracr-mate sequence (encompassing a “direct repeat” and a tracrRNA-processed partial direct repeat in the context of an endogenous CRISPR system), a guide sequence (also referred to as a “spacer” in the context of an endogenous CRISPR system), or “RNA(s)” as that term is herein used (e.g., RNA(s) to guide Cas, such as Cas9, e.g. CRISPR RNA and transactivating (tracr) RNA or a single guide RNA (sgRNA) (chimeric RNA)) or other sequences and transcripts from a CRISPR locus. In general, a CRISPR system is characterized by elements that promote the formation of a CRISPR complex at the site of a target sequence (also referred to as a protospacer in the context of an endogenous CRISPR system). See, e.g., Shmakov et al. (2015) “Discovery and Functional Characterization of Diverse Class 2 CRISPR-Cas systems”, Molecular Cell, DOI: dx.doi.org/10.1016/j.molce1.2015.10.008.

[0155] In certain embodiments, a protospacer adjacent motif (PAM) or PAM-like motif directs binding of the effector protein complex as disclosed herein to the target locus of interest. In one example embodiment, the PAM may be a 5′ PAM (i.e., located upstream of the 5′ end of the protospacer). In other embodiments, the PAM may be a 3′ PAM (i.e., located downstream of the 5′ end of the protospacer). The term “PAM” may be used interchangeably with the term “PFS” or “protospacer flanking site” or “protospacer flanking sequence”.

[0156] In a preferred embodiment, the CRISPR effector protein may recognize a 3′ PAM. In certain embodiments, the CRISPR effector protein may recognize a 3′ PAM which is 5′H, wherein H is A, C or U.

[0157] In the context of formation of a CRISPR complex, “target sequence” refers to a sequence to which a guide sequence is designed to have complementarity, where hybridization between a target sequence and a guide sequence promotes the formation of a CRISPR complex. A target sequence may comprise RNA polynucleotides. The term “target RNA” refers to a RNA polynucleotide being or comprising the target sequence. In other words, the target RNA may be a RNA polynucleotide or a part of a RNA polynucleotide to which a part of the gRNA, i.e. the guide sequence, is designed to have complementarity and to which the effector function mediated by the complex comprising CRISPR effector protein and a gRNA is to be directed. In one example embodiment, a target sequence is located in the nucleus or cytoplasm of a cell.

[0158] In one example embodiment, the CRISPR effector protein may be delivered using a nucleic acid molecule encoding the CRISPR protein. The nucleic acid molecule encoding a CRISPR protein, may advantageously be a codon optimized CRISPR protein. An example of a codon optimized sequence, is in this instance a sequence optimized for expression in eukaryote, e.g., humans (i.e. being optimized for expression in humans), or for another eukaryote, animal or mammal as herein discussed; see, e.g., SaCas9 human codon optimized sequence in WO 2014/093622 (PCT/US2013/074667). Whilst this is preferred, it will be appreciated that other examples are possible and codon optimization for a host species other than human, or for codon optimization for specific organs is known. In one example embodiment, an enzyme coding sequence encoding a CRISPR protein is a codon optimized for expression in particular cells, such as eukaryotic cells. The eukaryotic cells may be those of or derived from a particular organism, such as a plant or a mammal, including but not limited to human, or non-human eukaryote or animal or mammal as herein discussed, e.g., mouse, rat, rabbit, dog, livestock, or non-human mammal or primate. In one example embodiment, processes for modifying the germ line genetic identity of human beings and/or processes for modifying the genetic identity of animals which are likely to cause them suffering without any substantial medical benefit to man or animal, and also animals resulting from such processes, may be excluded. In general, codon optimization refers to a process of modifying a nucleic acid sequence for enhanced expression in the host cells of interest by replacing at least one codon (e.g. about or more than about 1, 2, 3, 4, 5, 10, 15, 20, 25, 50, or more codons) of the native sequence with codons that are more frequently or most frequently used in the genes of that host cell while maintaining the native amino acid sequence. Various species exhibit particular bias for certain codons of a particular amino acid. Codon bias (differences in codon usage between organisms) often correlates with the efficiency of translation of messenger RNA (mRNA), which is in turn believed to be dependent on, among other things, the properties of the codons being translated and the availability of particular transfer RNA (tRNA) molecules. The predominance of selected tRNAs in a cell is generally a reflection of the codons used most frequently in peptide synthesis. Accordingly, genes can be tailored for optimal gene expression in a given organism based on codon optimization. Codon usage tables are readily available, for example, at the “Codon Usage Database” available at kazusa.orjp/codon/and these tables can be adapted in a number of ways. See Nakamura, Y., et al. “Codon usage tabulated from the international DNA sequence databases: status for the year 2000” Nucl. Acids Res. 28:292 (2000). Computer algorithms for codon optimizing a particular sequence for expression in a particular host cell are also available, such as Gene Forge (Aptagen; Jacobus, PA), are also available. In one example embodiment, one or more codons (e.g., 1, 2, 3, 4, 5, 10, 15, 20, 25, 50, or more, or all codons) in a sequence encoding a Cas correspond to the most frequently used codon for a particular amino acid.

[0159] In certain embodiments, the methods as described herein may comprise providing a transgenic cell in which one or more nucleic acids encoding one or more guide RNAs are provided or introduced operably connected in the cell with a regulatory element comprising a promoter of one or more genes of interest. As used herein, the term “Cas transgenic cell” refers to a cell, such as a eukaryotic cell, in which a Cas gene has been genomically integrated. The nature, type, or origin of the cell are not particularly limiting according to the present invention. Also the way the Cas transgene is introduced in the cell may vary and can be any method as is known in the art. In certain embodiments, the Cas transgenic cell is obtained by introducing the Cas transgene in an isolated cell. In certain other embodiments, the Cas transgenic cell is obtained by isolating cells from a Cas transgenic organism. By means of example, and without limitation, the Cas transgenic cell as referred to herein may be derived from a Cas transgenic eukaryote, such as a Cas knock-in eukaryote. Reference is made to WO 2014/093622 (PCT/US13/74667), incorporated herein by reference. Methods of US Patent Publication Nos. 20120017290 and 20110265198 assigned to Sangamo BioSciences, Inc. directed to targeting the Rosa locus may be modified to utilize the CRISPR Cas system of the present invention. Methods of US Patent Publication No. 20130236946 assigned to Cellectis directed to targeting the Rosa locus may also be modified to utilize the CRISPR Cas system of the present invention. By means of further example reference is made to Platt et. al. (Cell; 159(2):440-455 (2014)), describing a Cas9 knock-in mouse, which is incorporated herein by reference. The Cas transgene can further comprise a Lox-Stop-polyA-Lox(LSL) cassette thereby rendering Cas expression inducible by Cre recombinase. Alternatively, the Cas transgenic cell may be obtained by introducing the Cas transgene in an isolated cell. Delivery systems for transgenes are well known in the art. By means of example, the Cas transgene may be delivered in for instance eukaryotic cell by means of vector (e.g., AAV, adenovirus, lentivirus) and/or particle and/or nanoparticle delivery, as also described herein elsewhere.

[0160] It will be understood by the skilled person that the cell, such as the Cas transgenic cell, as referred to herein may comprise further genomic alterations besides having an integrated Cas gene or the mutations arising from the sequence specific action of Cas when complexed with RNA capable of guiding Cas to a target locus.

[0161] The guide RNA(s) encoding sequences and/or Cas encoding sequences, can be functionally or operatively linked to regulatory element(s) and hence the regulatory element(s) drive expression. The promoter(s) can be constitutive promoter(s) and/or conditional promoter(s) and/or inducible promoter(s) and/or tissue specific promoter(s). The promoter can be selected from the group consisting of RNA polymerases, pol I, pol II, pol III, T7, U6, H1, retroviral Rous sarcoma virus (RSV) LTR promoter, the cytomegalovirus (CMV) promoter, the SV40 promoter, the dihydrofolate reductase promoter, the β-actin promoter, the phosphoglycerol kinase (PGK) promoter, and the EFlα promoter. An advantageous promoter is the promoter is U6.

### Guide Molecules and Tracr Sequences

[0162] The composition herein may comprise one or more guide molecules. As used herein, the term “guide sequence” and “guide molecule” in the context of a CRISPR-Cas system, comprises any polynucleotide sequence having sufficient complementarity with a target nucleic acid sequence to hybridize with the target nucleic acid sequence and direct sequence-specific binding of a nucleic acid-targeting complex to the target nucleic acid sequence. The guide sequences made using the methods disclosed herein may be a full-length guide sequence, a truncated guide sequence, a full-length sgRNA sequence, a truncated sgRNA sequence, or an E+F sgRNA sequence. In one example embodiment, the degree of complementarity of the guide sequence to a given target sequence, when optimally aligned using a suitable alignment algorithm, is about or more than about 50%, 60%, 75%, 80%, 85%, 90%, 95%, 97.5%, 99%, or more. In one example embodiment, the guide molecule comprises a guide sequence that may be designed to have at least one mismatch with the target sequence, such that a RNA duplex is formed between the guide sequence and the target sequence. Accordingly, the degree of complementarity is preferably less than 99%. For instance, where the guide sequence consists of 24 nucleotides, the degree of complementarity is more particularly about 96% or less. In particular embodiments, the guide sequence is designed to have a stretch of two or more adjacent mismatching nucleotides, such that the degree of complementarity over the entire guide sequence is further reduced. For instance, where the guide sequence consists of 24 nucleotides, the degree of complementarity is more particularly about 96% or less, more particularly, about 92% or less, more particularly about 88% or less, more particularly about 84% or less, more particularly about 80% or less, more particularly about 76% or less, more particularly about 72% or less, depending on whether the stretch of two or more mismatching nucleotides encompasses 2, 3, 4, 5, 6 or 7 nucleotides, etc. In one example embodiment, aside from the stretch of one or more mismatching nucleotides, the degree of complementarity, when optimally aligned using a suitable alignment algorithm, is about or more than about 50%, 60%, 75%, 80%, 85%, 90%, 95%, 97.5%, 99%, or more. Optimal alignment may be determined with the use of any suitable algorithm for aligning sequences, non-limiting example of which include the Smith-Waterman algorithm, the Needleman-Wunsch algorithm, algorithms based on the Burrows-Wheeler Transform (e.g., the Burrows Wheeler Aligner), ClustalW, Clustal X, BLAT, Novoalign (Novocraft Technologies; available at www.novocraft.com), ELAND (Illumina, San Diego, CA), SOAP (available at soap.genomics.org.cn), and Maq (available at maq.sourceforge.net). The ability of a guide sequence (within a nucleic acid-targeting guide RNA) to direct sequence-specific binding of a nucleic acid-targeting complex to a target nucleic acid sequence may be assessed by any suitable assay. For example, the components of a nucleic acid-targeting CRISPR system sufficient to form a nucleic acid-targeting complex, including the guide sequence to be tested, may be provided to a host cell having the corresponding target nucleic acid sequence, such as by transfection with vectors encoding the components of the nucleic acid-targeting complex, followed by an assessment of preferential targeting (e.g., cleavage) within the target nucleic acid sequence, such as by Surveyor assay as described herein. Similarly, cleavage of a target nucleic acid sequence (or a sequence in the vicinity thereof) may be evaluated in a test tube by providing the target nucleic acid sequence, components of a nucleic acid-targeting complex, including the guide sequence to be tested and a control guide sequence different from the test guide sequence, and comparing binding or rate of cleavage at or in the vicinity of the target sequence between the test and control guide sequence reactions. Other assays are possible, and will occur to those skilled in the art. A guide sequence, and hence a nucleic acid-targeting guide RNA may be selected to target any target nucleic acid sequence.

[0163] In certain embodiments, the guide sequence or spacer length of the guide molecules is from 10 to 50 nt. In certain embodiments, the spacer length of the guide RNA is at least 10 nucleotides. In certain embodiments, the spacer length is from 12 to 14 nt, e.g., 12, 13, or 14 nt, 15 to 17 nt, e.g., 15, 16, or 17 nt, from 17 to 20 nt, e.g., 17, 18, 19, or 20 nt, from 20 to 24 nt, e.g., 20, 21, 22, 23, or 24 nt, from 23 to 25 nt, e.g., 23, 24, or 25 nt, from 24 to 27 nt, e.g., 24, 25, 26, or 27 nt, from 27 to 30 nt, e.g., 27, 28, 29, or 30 nt, from 30 to 35 nt, e.g., 30, 31, 32, 33, 34, or 35 nt, or 35 nt or longer. In certain example embodiment, the guide sequence is 10, 11, 12, 13, 14, 15, 16, 17,18, 19, 20, 21, 22, 23, 24, 25, 26, 27, 28, 29, 30, 31, 32, 33, 34, 35, 36, 37, 38, 39 40, 41, 42, 43, 44, 45, 46, 47 48, 49, 50, 51, 52, 53, 54, 55, 56, 57, 58, 59, 60, 61, 62, 63, 64, 65, 66, 67, 68, 69, 70, 71, 72, 73, 74, 75, 76, 77, 78, 79, 80, 81, 82, 83, 84, 85, 86, 87, 88, 89, 90, 91, 92, 93, 94, 95, 96, 97, 98, 99, or 100 nt.

[0164] In one example embodiment, the guide sequence is an RNA sequence of between 10 to 50 nt in length, but more particularly of about 20 to 30 nt advantageously about 20 nt, 23 to 25 nt or 24 nt. The guide sequence is selected so as to ensure that it hybridizes to the target sequence. This is described more in detail below. Selection can encompass further steps which increase efficacy and specificity.

[0165] In one example embodiment, the guide sequence has a canonical length (e.g., about 15-30 nt) and is used to hybridize with the target RNA or DNA. In one example embodiment, a guide molecule is longer than the canonical length (e.g., >30 nt) and is used to hybridize with the target RNA or DNA, such that a region of the guide sequence hybridizes with a region of the RNA or DNA strand outside of the Cas-guide target complex. This can be of interest where additional modifications, such as deamination of nucleotides is of interest. In alternative embodiments, it is of interest to maintain the limitation of the canonical guide sequence length.

[0166] In one example embodiment, the CRISPR-Cas systems further comprise a trans-activating CRISPR (tracr) sequence or “tracrRNA.” The tracrRNA includes any polynucleotide sequence that has sufficient complementarity with a crRNA sequence to hybridize. In one example embodiment, the degree of complementarity between the tracrRNA sequence and crRNA sequence along the length of the shorter of the two when optimally aligned is about or more than about 25%, 30%, 40%, 50%, 60%, 70%, 80%, 90%, 95%, 97.5%, 99%, or higher. In one example embodiment, the tracr sequence is about or more than about 5, 6, 7, 8, 9, 10, 11, 12, 13, 14, 15, 16, 17, 18, 19, 20, 25, 30, 40, 50, 60, 70, 80, 90, 100, 110, 120, 130, 140, 150, 160, 170, 180, 190, 200, 210, 220, 230 or more nucleotides in length. In one example embodiment the tracr is 210, 211, 212, 213, 214, 215, 216, 217, 218, 219, or 220 nucleotides in length. In one example embodiment, the tracr sequence and crRNA sequence are contained within a single transcript, such that hybridization between the two produces a transcript having a secondary structure, such as a hairpin. In an embodiment of the invention, the transcript or transcribed polynucleotide sequence has at least two or more hairpins. In preferred embodiments, the transcript has two, three, four or five hairpins. In a further embodiment of the invention, the transcript has at most five hairpins. In a hairpin structure the portion of the sequence 5′ of the final “N” and upstream of the loop corresponds to the tracr mate sequence, and the portion of the sequence 3′ of the loop corresponds to the tracr sequence. In one example embodiment, guide molecule and tracr sequence are physically or chemically linked. Example tracrRNA sequences for use in certain embodiments of the invention are described in further detail in the “Examples” section below.

[0167] In one example embodiment, the sequence of the guide molecule (direct repeat and/or spacer) is selected to reduce the degree of secondary structure within the guide molecule. In one example embodiment, about or less than about 75%, 50%, 40%, 30%, 25%, 20%, 15%, 10%, 5%, 1%, or fewer of the nucleotides of the nucleic acid-targeting guide RNA participate in self-complementary base pairing when optimally folded. Optimal folding may be determined by any suitable polynucleotide folding algorithm. Some programs are based on calculating the minimal Gibbs free energy. An example of one such algorithm is mFold, as described by Zuker and Stiegler (Nucleic Acids Res. 9 (1981), 133-148). Another example folding algorithm is the online webserver RNAfold, developed at Institute for Theoretical Chemistry at the University of Vienna, using the centroid structure prediction algorithm (see e.g., A. R. Gruber et al., 2008, Cell 106(1): 23-24; and PA Carr and GM Church, 2009, Nature Biotechnology 27(12): 1151-62).

[0168] In one example embodiment, a nucleic acid-targeting guide is designed or selected to modulate intermolecular interactions among guide molecules, such as among stem-loop regions of different guide molecules. It will be appreciated that nucleotides within a guide that base-pair to form a stem-loop are also capable of base-pairing to form an intermolecular duplex with a second guide and that such an intermolecular duplex would not have a secondary structure compatible with CRISPR complex formation. Accordingly, it is useful to select or design DR sequences in order to modulate stem-loop formation and CRISPR complex formation. In one example embodiment, about or less than about 75%, 50%, 40%, 30%, 25%, 20%, 15%, 10%, 5%, 1%, or fewer of nucleic acid-targeting guides are in intermolecular duplexes. It will be appreciated that stem-loop variation will often be within limits imposed by DR-CRISPR effector interactions. One way to modulate stem-loop formation or change the equilibrium between stem-loop and intermolecular duplex is to vary nucleotide pairs in the stem of the stem-loop of a DR. For example, in one example embodiment, a G-C pair is replaced by an A-U or U-A pair. In another embodiment, an A-U pair is substituted for a G-C or a C-G pair. In another embodiment, a naturally occurring nucleotide is replaced by a nucleotide analog. Another way to modulate stem-loop formation or change the equilibrium between stem-loop and intermolecular duplex is to modify the loop of the stem-loop of a DR. Without being bound by theory, the loop can be viewed as an intervening sequence flanked by two sequences that are complementary to each other. When that intervening sequence is not self-complementary, its effect will be to destabilize intermolecular duplex formation. The same principle applies when guides are multiplexed: while the targeting sequences may differ, it may be advantageous to modify the stem-loop region in the DRs of the different guides. Moreover, when guides are multiplexed, the relative activities of the different guides can be modulated by balancing the activity of each individual guide. In certain embodiments, the equilibrium between intermolecular stem-loops vs. intermolecular duplexes is determined. The determination may be made by physical or biochemical means and can be in the presence or absence of a CRISPR effector.

[0169] In one example embodiment, it is of interest to reduce the susceptibility of the guide molecule to RNA cleavage, such as cleavage by a CRISPR system that cleaves RNA. Accordingly, in particular embodiments, the guide molecule is adjusted to avoid cleavage by a CRISPR system or other RNA-cleaving enzymes.

[0170] In certain embodiments, the guide molecule comprises non-naturally occurring nucleic acids and/or non-naturally occurring nucleotides and/or nucleotide analogs, and/or chemically modifications. Preferably, these non-naturally occurring nucleic acids and non-naturally occurring nucleotides are located outside the guide sequence. Non-naturally occurring nucleic acids can include, for example, mixtures of naturally and non-naturally occurring nucleotides. Non-naturally occurring nucleotides and/or nucleotide analogs may be modified at the ribose, phosphate, and/or base moiety. In an embodiment of the invention, a guide nucleic acid comprises ribonucleotides and non-ribonucleotides. In one such embodiment, a guide comprises one or more ribonucleotides and one or more deoxyribonucleotides. In an embodiment of the invention, the guide comprises one or more non-naturally occurring nucleotide or nucleotide analog such as a nucleotide with phosphorothioate linkage, a locked nucleic acid (LNA) nucleotides comprising a methylene bridge between the 2′ and 4′ carbons of the ribose ring, or bridged nucleic acids (BNA). Other examples of modified nucleotides include 2′-O-methyl analogs, 2′-deoxy analogs, or 2′-fluoro analogs. Further examples of modified bases include, but are not limited to, 2-aminopurine, 5-bromo-uridine, pseudouridine, inosine, 7-methylguanosine. Examples of guide RNA chemical modifications include, without limitation, incorporation of 2′-O-methyl (M), 2′-O-methyl 3 ‘phosphorothioate (MS), S-constrained ethyl(cEt), or 2’-O-methyl 3′thioPACE (MSP) at one or more terminal nucleotides. Such chemically modified guides can comprise increased stability and increased activity as compared to unmodified guides, though on-target vs. off-target specificity is not predictable. (See, Hendel, 2015, Nat Biotechnol. 33(9):985-9, doi: 10.1038/nbt.3290, published online 29 Jun. 2015 Ragdarm et al., 2015, PNAS, E7110-E7111; Allerson et al., J. Med. Chem. 2005, 48:901-904; Bramsen et al., Front. Genet., 2012, 3:154; Deng et al., PNAS, 2015, 112:11870-11875; Sharma et al., MedChemComm., 2014, 5:1454-1471; Hendel et al., Nat. Biotechnol. (2015) 33(9): 985-989; Li et al., Nature Biomedical Engineering, 2017, 1, 0066 DOI:10.1038/s41551-017-0066). In one example embodiment, the 5′ and/or 3′ end of a guide RNA is modified by a variety of functional moieties including fluorescent dyes, polyethylene glycol, cholesterol, proteins, or detection tags. (See Kelly et al., 2016, J. Biotech. 233:74-83). In certain embodiments, a guide comprises ribonucleotides in a region that binds to a target RNA and one or more deoxyribonucleotides and/or nucleotide analogs in a region that binds to a Type V effector. In an embodiment of the invention, deoxyribonucleotides and/or nucleotide analogs are incorporated in engineered guide structures, such as, without limitation, stem-loop regions, and the seed region. In certain embodiments, at least 1, 2, 3, 4, 5, 6, 7, 8, 9, 10, 11, 12, 13, 14, 15, 16, 17, 18, 19, 20, 21, 22, 23, 24, 25, 26, 27, 28, 29, 30, 35, 40, 45, 50, or 75 nucleotides of a guide is chemically modified. In one example embodiment, 3-5 nucleotides at either the 3′ or the 5′ end of a guide is chemically modified. In one example embodiment, only minor modifications are introduced in the seed region, such as 2′-F modifications. In one example embodiment, 2′-F modification is introduced at the 3′ end of a guide. In certain embodiments, three to five nucleotides at the 5′ and/or the 3′ end of the guide are chemically modified with 2′-O-methyl (M), 2′-O-methyl 3′ phosphorothioate (MS), S-constrained ethyl(cEt), or 2′-O-methyl 3′ thioPACE (MSP). Such modification can enhance genome editing efficiency (see Hendel et al., Nat. Biotechnol. (2015) 33(9): 985-989). In certain embodiments, all of the phosphodiester bonds of a guide are substituted with phosphorothioates (PS) for enhancing levels of gene disruption. In certain embodiments, more than five nucleotides at the 5′ and/or the 3′ end of the guide are chemically modified with 2′-O-Me, 2′-F or S-constrained ethyl(cEt). Such chemically modified guide can mediate enhanced levels of gene disruption (see Ragdarm et al., 0215, PNAS, E7110-E7111). In an embodiment of the invention, a guide is modified to comprise a chemical moiety at its 3′ and/or 5′ end. Such moieties include, but are not limited to amine, azide, alkyne, thio, dibenzocyclooctyne (DBCO), or Rhodamine, peptides, nuclear localization sequence (NLS), peptide nucleic acid (PNA), polyethylene glycol (PEG), triethylene glycol, or tetraethyleneglycol (TEG). In certain embodiment, the chemical moiety is conjugated to the guide by a linker, such as an alkyl chain. In certain embodiments, the chemical moiety is conjugated to the guide by a linker, such as an alkyl chain. In certain embodiments, the chemical moiety of the modified guide can be used to attach the guide to another molecule, such as DNA, RNA, protein, or nanoparticles. Such chemically modified guide can be used to identify or enrich cells generically edited by a CRISPR system (see Lee et al., eLife, 2017, 6:e25312, D01:10.7554).

[0171] In one example embodiment, 3 nucleotides at each of the 3′ and 5′ ends are chemically modified. In a specific embodiment, the modifications comprise 2′-O-methyl or phosphorothioate analogs. In a specific embodiment, 12 nucleotides in the tetraloop and 16 nucleotides in the stem-loop region are replaced with 2′-O-methyl analogs. Such chemical modifications improve in vivo editing and stability (see Finn et al., Cell Reports (2018), 22: 2227-2235). In one example embodiment, more than 60 or 70 nucleotides of the guide are chemically modified. In one example embodiment, this modification comprises replacement of nucleotides with 2′-O-methyl or 2′-fluoro nucleotide analogs or phosphorothioate (PS) modification of phosphodiester bonds. In one example embodiment, the chemical modification comprises 2′-O-methyl or 2′-fluoro modification of guide nucleotides extending outside of the nuclease protein when the CRISPR complex is formed or PS modification of 20 to 30 or more nucleotides of the 3′-terminus of the guide. In a particular embodiment, the chemical modification further comprises 2′-O-methyl analogs at the 5′ end of the guide or 2′-fluoro analogs in the seed and tail regions. Such chemical modifications improve stability to nuclease degradation and maintain or enhance genome-editing activity or efficiency, but modification of all nucleotides may abolish the function of the guide (see Yin et al., Nat. Biotech. (2018), 35(12): 1179-1187). Such chemical modifications may be guided by knowledge of the structure of the CRISPR complex, including knowledge of the limited number of nuclease and RNA 2′-OH interactions (see Yin et al., Nat. Biotech. (2018), 35(12): 1179-1187). In one example embodiment, one or more guide RNA nucleotides may be replaced with DNA nucleotides. In one example embodiment, up to 2, 4, 6, 8, 10, or 12 RNA nucleotides of the 5′-end tail/seed guide region are replaced with DNA nucleotides. In certain embodiments, the majority of guide RNA nucleotides at the 3′ end are replaced with DNA nucleotides. In particular embodiments, 16 guide RNA nucleotides at the 3′ end are replaced with DNA nucleotides. In particular embodiments, 8 guide RNA nucleotides of the 5′-end tail/seed region and 16 RNA nucleotides at the 3′ end are replaced with DNA nucleotides. In particular embodiments, guide RNA nucleotides that extend outside of the nuclease protein when the CRISPR complex is formed are replaced with DNA nucleotides. Such replacement of multiple RNA nucleotides with DNA nucleotides leads to decreased off-target activity but similar on-target activity compared to an unmodified guide; however, replacement of all RNA nucleotides at the 3′ end may abolish the function of the guide (see Yin et al., Nat. Chem. Biol. (2018) 14, 311-316). Such modifications may be guided by knowledge of the structure of the CRISPR complex, including knowledge of the limited number of nuclease and RNA 2′-OH interactions (see Yin et al., Nat. Chem. Biol. (2018) 14, 311-316).

[0172] In one example embodiment, the guide molecule forms a stemloop with a separate non-covalently linked sequence, which can be DNA or RNA. In particular embodiments, the sequences forming the guide are first synthesized using the standard phosphoramidite synthetic protocol (Herdewijn, P., ed., Methods in Molecular Biology Col 288, Oligonucleotide Synthesis: Methods and Applications, Humana Press, New Jersey (2012)). In one example embodiment, these sequences can be functionalized to contain an appropriate functional group for ligation using the standard protocol known in the art (Hermanson, G. T., Bioconjugate Techniques, Academic Press (2013)). Examples of functional groups include, but are not limited to, hydroxyl, amine, carboxylic acid, carboxylic acid halide, carboxylic acid active ester, aldehyde, carbonyl, chlorocarbonyl, imidazolylcarbonyl, hydrozide, semicarbazide, thio semicarbazide, thiol, maleimide, haloalkyl, sufonyl, ally, propargyl, diene, alkyne, and azide. Once this sequence is functionalized, a covalent chemical bond or linkage can be formed between this sequence and the direct repeat sequence. Examples of chemical bonds include, but are not limited to, those based on carbamates, ethers, esters, amides, imines, amidines, aminotrizines, hydrozone, disulfides, thioethers, thioesters, phosphorothioates, phosphorodithioates, sulfonamides, sulfonates, fulfones, sulfoxides, ureas, thioureas, hydrazide, oxime, triazole, photolabile linkages, C—C bond forming groups such as Diels-Alder cyclo-addition pairs or ring-closing metathesis pairs, and Michael reaction pairs.

[0173] In one example embodiment, these stem-loop forming sequences can be chemically synthesized. In one example embodiment, the chemical synthesis uses automated, solid-phase oligonucleotide synthesis machines with 2′-acetoxyethyl orthoester (2′-ACE) (Scaringe et al., J. Am. Chem. Soc. (1998) 120: 11820-11821; Scaringe, Methods Enzymol. (2000) 317: 3-18) or 2′-thionocarbamate (2′-TC) chemistry (Dellinger et al., J. Am. Chem. Soc. (2011) 133: 11540-11546; Hendel et al., Nat. Biotechnol. (2015) 33:985-989).

[0174] In certain embodiments, the guide molecule comprises (1) a guide sequence capable of hybridizing to a target locus and (2) a tracr mate or direct repeat sequence whereby the direct repeat sequence is located upstream (i.e., 5′) or downstream (i.e. 3′) from the guide sequence. In a particular embodiment the seed sequence (i.e. the sequence essential for recognition and/or hybridization to the sequence at the target locus) of the guide sequence is approximately within the first 10 nucleotides of the guide sequence.

[0175] In a particular embodiment the guide molecule comprises a guide sequence linked to a direct repeat sequence, wherein the direct repeat sequence comprises one or more stem loops or optimized secondary structures. In particular embodiments, the direct repeat has a minimum length of 16 nts and a single stem loop. In further embodiments, the direct repeat has a length longer than 16 nts, preferably more than 17 nts, and has more than one stem loops or optimized secondary structures. In particular embodiments, the guide molecule comprises or consists of the guide sequence linked to all or part of the natural direct repeat sequence. A typical Type V or Type VI CRISPR-cas guide molecule comprises (in 3′ to 5′ direction or in 5′ to 3′ direction): a guide sequence, a first complimentary stretch (the “repeat”), a loop (which is typically 4 or 5 nucleotides long), a second complimentary stretch (the “anti-repeat” being complimentary to the repeat), and a poly A (often poly U in RNA) tail (terminator). In certain embodiments, the direct repeat sequence retains its natural architecture and forms a single stem loop. In particular embodiments, certain aspects of the guide architecture can be modified, for example by addition, subtraction, or substitution of features, whereas certain other aspects of guide architecture are maintained. Preferred locations for engineered guide molecule modifications, including but not limited to insertions, deletions, and substitutions include guide termini and regions of the guide molecule that are exposed when complexed with the CRISPR-Cas protein and/or target, for example the stemloop of the direct repeat sequence.

[0176] In particular embodiments, the stem comprises at least about 4 bp comprising complementary X and Y sequences, although stems of more, e.g., 5, 6, 7, 8, 9, 10, 11 or 12 or fewer, e.g., 3, 2, base pairs are also contemplated. Thus, for example X2-10 and Y2-10 (wherein X and Y represent any complementary set of nucleotides) may be contemplated. In one aspect, the stem made of the X and Y nucleotides, together with the loop will form a complete hairpin in the overall secondary structure; and, this may be advantageous and the amount of base pairs can be any amount that forms a complete hairpin. In one aspect, any complementary X:Y basepairing sequence (e.g., as to length) is tolerated, so long as the secondary structure of the entire guide molecule is preserved. In one aspect, the loop that connects the stem made of X:Y basepairs can be any sequence of the same length (e.g., 4 or 5 nucleotides) or longer that does not interrupt the overall secondary structure of the guide molecule. In one aspect, the stemloop can further comprise, e.g. an MS2 aptamer. In one aspect, the stem comprises about 5-7 bp comprising complementary X and Y sequences, although stems of more or fewer basepairs are also contemplated. In one aspect, non-Watson Crick basepairing is contemplated, where such pairing otherwise generally preserves the architecture of the stemloop at that position.

[0177] In particular embodiments, the natural hairpin or stemloop structure of the guide molecule is extended or replaced by an extended stemloop. It has been demonstrated that extension of the stem can enhance the assembly of the guide molecule with the CRISPR-Cas protein (Chen et al. Cell. (2013); 155(7): 1479-1491). In particular embodiments, the stem of the stemloop is extended by at least 1, 2, 3, 4, 5 or more complementary basepairs (i.e. corresponding to the addition of 2, 4, 6, 8, 10 or more nucleotides in the guide molecule). In particular embodiments these are located at the end of the stem, adjacent to the loop of the stemloop.

[0178] In particular embodiments, the susceptibility of the guide molecule to RNases or to decreased expression can be reduced by slight modifications of the sequence of the guide molecule which do not affect its function. For instance, in particular embodiments, premature termination of transcription, such as premature transcription of U6 Pol-III, can be removed by modifying a putative Pol-III terminator (4 consecutive U's) in the guide molecules sequence. Where such sequence modification is required in the stemloop of the guide molecule, it is preferably ensured by a basepair flip.

[0179] In a particular embodiment, the direct repeat may be modified to comprise one or more protein-binding RNA aptamers. In a particular embodiment, one or more aptamers may be included such as part of optimized secondary structure. Such aptamers may be capable of binding a bacteriophage coat protein as detailed further herein.

[0180] In one example embodiment, the guide molecule forms a duplex with a target RNA comprising at least one target cytosine residue to be edited. Upon hybridization of the guide RNA molecule to the target RNA, the cytidine deaminase binds to the single strand RNA in the duplex made accessible by the mismatch in the guide sequence and catalyzes deamination of one or more target cytosine residues comprised within the stretch of mismatching nucleotides.

[0181] A guide sequence, and hence a nucleic acid-targeting guide RNA, may be selected to target any target nucleic acid sequence. The target sequence may be mRNA.

[0182] In certain embodiments, the target sequence should be associated with a PAM (protospacer adjacent motif) or PFS (protospacer flanking sequence or site); that is, a short sequence recognized by the CRISPR complex. Depending on the nature of the CRISPR-Cas protein, the target sequence should be selected such that its complementary sequence in the DNA duplex (also referred to herein as the non-target sequence) is upstream or downstream of the PAM. In the embodiments of the present invention where the CRISPR-Cas protein is a Cas13 protein, the complementary sequence of the target sequence is downstream or 3′ of the PAM or upstream or 5′ of the PAM. The precise sequence and length requirements for the PAM differ depending on the Cas13 protein used, but PAMs are typically 2-5 base pair sequences adjacent the protospacer (that is, the target sequence). Examples of the natural PAM sequences for different Cas13 orthologues are provided herein below and the skilled person will be able to identify further PAM sequences for use with a given Cas13 protein.

[0183] Further, engineering of the PAM Interacting (PI) domain may allow programing of PAM specificity, improve target site recognition fidelity, and increase the versatility of the CRISPR-Cas protein, for example as described for Cas9 in Kleinstiver B P et al. Engineered CRISPR-Cas9 nucleases with altered PAM specificities. Nature. 2015 Jul. 23; 523(7561):481-5. doi: 10.1038/nature14592. As further detailed herein, the skilled person will understand that Cas13 proteins may be modified analogously.

[0184] In particular embodiments, the guide is an escorted guide. By “escorted” is meant that the CRISPR-Cas system or complex or guide is delivered to a selected time or place within a cell, so that activity of the CRISPR-Cas system or complex or guide is spatially or temporally controlled. For example, the activity and destination of the 3 CRISPR-Cas system or complex or guide may be controlled by an escort RNA aptamer sequence that has binding affinity for an aptamer ligand, such as a cell surface protein or other localized cellular component. Alternatively, the escort aptamer may for example be responsive to an aptamer effector on or in the cell, such as a transient effector, such as an external energy source that is applied to the cell at a particular time.

[0185] The escorted CRISPR-Cas systems or complexes have a guide molecule with a functional structure designed to improve guide molecule structure, architecture, stability, genetic expression, or any combination thereof. Such a structure can include an aptamer.

[0186] Aptamers are biomolecules that can be designed or selected to bind tightly to other ligands, for example using a technique called systematic evolution of ligands by exponential enrichment (SELEX; Tuerk C, Gold L: “Systematic evolution of ligands by exponential enrichment: RNA ligands to bacteriophage T4 DNA polymerase.” Science 1990, 249:505-510). Nucleic acid aptamers can for example be selected from pools of random-sequence oligonucleotides, with high binding affinities and specificities for a wide range of biomedically relevant targets, suggesting a wide range of therapeutic utilities for aptamers (Keefe, Anthony D., Supriya Pai, and Andrew Ellington. “Aptamers as therapeutics.” Nature Reviews Drug Discovery 9.7 (2010): 537-550). These characteristics also suggest a wide range of uses for aptamers as drug delivery vehicles (Levy-Nissenbaum, Etgar, et al. “Nanotechnology and aptamers: applications in drug delivery.” Trends in Biotechnology 26.8 (2008): 442-449; and, Hicke B J, Stephens A W. “Escort aptamers: a delivery service for diagnosis and therapy.” J Clin Invest 2000, 106:923-928.). Aptamers may also be constructed that function as molecular switches, responding to a que by changing properties, such as RNA aptamers that bind fluorophores to mimic the activity of green fluorescent protein (Paige, Jeremy S., Karen Y. Wu, and Samie R. Jaffrey. “RNA mimics of green fluorescent protein.” Science 333.6042 (2011): 642-646). It has also been suggested that aptamers may be used as components of targeted siRNA therapeutic delivery systems, for example targeting cell surface proteins (Zhou, Jiehua, and John J. Rossi. “Aptamer-targeted cell-specific RNA interference.” Silence 1.1 (2010): 4).

[0187] Accordingly, in particular embodiments, the guide molecule is modified, e.g., by one or more aptamer(s) designed to improve guide molecule delivery, including delivery across the cellular membrane, to intracellular compartments, or into the nucleus. Such a structure can include, either in addition to the one or more aptamer(s) or without such one or more aptamer(s), moiety(ies) so as to render the guide molecule deliverable, inducible or responsive to a selected effector. The invention accordingly comprehends a guide molecule that responds to normal or pathological physiological conditions, including without limitation pH, hypoxia, O₂ concentration, temperature, protein concentration, enzymatic concentration, lipid structure, light exposure, mechanical disruption (e.g. ultrasound waves), magnetic fields, electric fields, or electromagnetic radiation.

[0188] Light responsiveness of an inducible system may be achieved via the activation and binding of cryptochrome-2 and CIB 1. Blue light stimulation induces an activating conformational change in cryptochrome-2, resulting in recruitment of its binding partner C1B1. This binding is fast and reversible, achieving saturation in <15 sec following pulsed stimulation and returning to baseline <15 min after the end of stimulation. These rapid binding kinetics result in a system temporally bound only by the speed of transcription/translation and transcript/protein degradation, rather than uptake and clearance of inducing agents. Crytochrome-2 activation is also highly sensitive, allowing for the use of low light intensity stimulation and mitigating the risks of phototoxicity. Further, in a context such as the intact mammalian brain, variable light intensity may be used to control the size of a stimulated region, allowing for greater precision than vector delivery alone may offer.

[0189] The invention contemplates energy sources such as electromagnetic radiation, sound energy or thermal energy to induce the guide. Advantageously, the electromagnetic radiation is a component of visible light. In a preferred embodiment, the light is a blue light with a wavelength of about 450 to about 495 nm. In an especially preferred embodiment, the wavelength is about 488 nm. In another preferred embodiment, the light stimulation is via pulses. The light power may range from about 0-9 mW/cm2. In a preferred embodiment, a stimulation paradigm of as low as 0.25 sec every 15 sec should result in maximal activation.

[0190] The chemical or energy sensitive guide may undergo a conformational change upon induction by the binding of a chemical source or by the energy allowing it act as a guide and have the Cas13 CRISPR-Cas system or complex function. The invention can involve applying the chemical source or energy so as to have the guide function and the Cas13 CRISPR-Cas system or complex function; and optionally further determining that the expression of the genomic locus is altered.

[0191] There are several different designs of this chemical inducible system: 1. ABI-PYL based system inducible by Abscisic Acid (ABA) (see, e.g., stke.sciencemag.org/cgi/content/ab stract/sigtrans;4/164/rs2), 2. FKBP-FRB based system inducible by rapamycin (or related chemicals based on rapamycin) (see, e.g., www.nature.com/nm eth/j ournal/v2/n6/full/nmeth763.html), 3. GID1-GAI based system inducible by Gibberellin (GA) (see, e.g., www.nature.com/nchembio/journal/v8/n5/full/nchembio.922.html).

[0192] A chemical inducible system can be an estrogen receptor (ER) based system inducible by 4-hydroxytamoxifen (4OHT) (see, e.g., www.pnas.org/content/104/3/1027.abstract). A mutated ligand-binding domain of the estrogen receptor called ERT2 translocates into the nucleus of cells upon binding of 4-hydroxytamoxifen. In further embodiments of the invention any naturally occurring or engineered derivative of any nuclear receptor, thyroid hormone receptor, retinoic acid receptor, estrogen receptor, estrogen-related receptor, glucocorticoid receptor, progesterone receptor, androgen receptor may be used in inducible systems analogous to the ER based inducible system.

[0193] Another inducible system is based on the design using Transient receptor potential (TRP) ion channel based system inducible by energy, heat or radio-wave (see, e.g., www.sciencemag.org/content/336/6081/604). These TRP family proteins respond to different stimuli, including light and heat. When this protein is activated by light or heat, the ion channel will open and allow the entering of ions such as calcium into the plasma membrane. This influx of ions will bind to intracellular ion interacting partners linked to a polypeptide including the guide and the other components of the CRISPR-Cas complex or system, and the binding will induce the change of sub-cellular localization of the polypeptide, leading to the entire polypeptide entering the nucleus of cells. Once inside the nucleus, the guide protein and the other components of the CRISPR-Cas complex will be active and modulating target gene expression in cells.

[0194] While light activation may be an advantageous embodiment, sometimes it may be disadvantageous especially for in vivo applications in which the light may not penetrate the skin or other organs. In this instance, other methods of energy activation are contemplated, in particular, electric field energy and/or ultrasound which have a similar effect.

[0195] Electric field energy is preferably administered substantially as described in the art, using one or more electric pulses of from about 1 Volt/cm to about 10 kVolts/cm under in vivo conditions. Instead of or in addition to the pulses, the electric field may be delivered in a continuous manner. The electric pulse may be applied for between 1 μs and 500 milliseconds, preferably between 1 μs and 100 milliseconds. The electric field may be applied continuously or in a pulsed manner for 5 about minutes.

[0196] As used herein, ‘electric field energy’ is the electrical energy to which a cell is exposed. Preferably the electric field has a strength of from about 1 Volt/cm to about 10 kVolts/cm or more under in vivo conditions (see WO97/49450).

[0197] As used herein, the term “electric field” includes one or more pulses at variable capacitance and voltage and including exponential and/or square wave and/or modulated wave and/or modulated square wave forms. References to electric fields and electricity should be taken to include reference to the presence of an electric potential difference in the environment of a cell. Such an environment may be set up by way of static electricity, alternating current (AC), direct current (DC), etc., as known in the art. The electric field may be uniform, non-uniform or otherwise, and may vary in strength and/or direction in a time dependent manner.

[0198] Single or multiple applications of electric field, as well as single or multiple applications of ultrasound are also possible, in any order and in any combination. The ultrasound and/or the electric field may be delivered as single or multiple continuous applications, or as pulses (pulsatile delivery).

[0199] Electroporation has been used in both in vitro and in vivo procedures to introduce foreign material into living cells. With in vitro applications, a sample of live cells is first mixed with the agent of interest and placed between electrodes such as parallel plates. Then, the electrodes apply an electrical field to the cell/implant mixture. Examples of systems that perform in vitro electroporation include the Electro Cell Manipulator ECM600 product, and the Electro Square Porator T820, both made by the BTX Division of Genetronics, Inc (see U.S. Pat. No. 5,869,326).

[0200] The known electroporation techniques (both in vitro and in vivo) function by applying a brief high voltage pulse to electrodes positioned around the treatment region. The electric field generated between the electrodes causes the cell membranes to temporarily become porous, whereupon molecules of the agent of interest enter the cells. In known electroporation applications, this electric field comprises a single square wave pulse on the order of 1000 V/cm, of about 100.mu.s duration. Such a pulse may be generated, for example, in known applications of the Electro Square Porator T820.

[0201] Preferably, the electric field has a strength of from about 1 V/cm to about 10 kV/cm under in vitro conditions. Thus, the electric field may have a strength of 1 V/cm, 2 V/cm, 3 V/cm, 4 V/cm, 5 V/cm, 6 V/cm, 7 V/cm, 8 V/cm, 9 V/cm, 10 V/cm, 20 V/cm, 50 V/cm, 100 V/cm, 200 V/cm, 300 V/cm, 400 V/cm, 500 V/cm, 600 V/cm, 700 V/cm, 800 V/cm, 900 V/cm, 1 kV/cm, 2 kV/cm, 5 kV/cm, 10 kV/cm, 20 kV/cm, 50 kV/cm or more. More preferably from about 0.5 kV/cm to about 4.0 kV/cm under in vitro conditions. Preferably the electric field has a strength of from about 1 V/cm to about 10 kV/cm under in vivo conditions. However, the electric field strengths may be lowered where the number of pulses delivered to the target site are increased. Thus, pulsatile delivery of electric fields at lower field strengths is envisaged.

[0202] Preferably, the application of the electric field is in the form of multiple pulses such as double pulses of the same strength and capacitance or sequential pulses of varying strength and/or capacitance. As used herein, the term “pulse” includes one or more electric pulses at variable capacitance and voltage and including exponential and/or square wave and/or modulated wave/square wave forms.

[0203] Preferably, the electric pulse is delivered as a waveform selected from an exponential wave form, a square wave form, a modulated wave form and a modulated square wave form.

[0204] A preferred embodiment employs direct current at low voltage. Thus, Applicants disclose the use of an electric field which is applied to the cell, tissue or tissue mass at a field strength of between 1V/cm and 20V/cm, for a period of 100 milliseconds or more, preferably 15 minutes or more.

[0205] Ultrasound is advantageously administered at a power level of from about 0.05 W/cm2 to about 100 W/cm2. Diagnostic or therapeutic ultrasound may be used, or combinations thereof.

[0206] As used herein, the term “ultrasound” refers to a form of energy which consists of mechanical vibrations the frequencies of which are so high they are above the range of human hearing. Lower frequency limit of the ultrasonic spectrum may generally be taken as about 20 kHz. Most diagnostic applications of ultrasound employ frequencies in the range 1 and 15 MHz′ (From Ultrasonics in Clinical Diagnosis, P. N. T. Wells, ed., 2^{nd}. Edition, Publ. Churchill Livingstone [Edinburgh, London & NY, 1977]).

[0207] Ultrasound has been used in both diagnostic and therapeutic applications. When used as a diagnostic tool (“diagnostic ultrasound”), ultrasound is typically used in an energy density range of up to about 100 mW/cm2 (FDA recommendation), although energy densities of up to 750 mW/cm2 have been used. In physiotherapy, ultrasound is typically used as an energy source in a range up to about 3 to 4 W/cm2 (WHO recommendation). In other therapeutic applications, higher intensities of ultrasound may be employed, for example, high intensity focused ultrasound (HIFU) at 100 W/cm up to 1 kW/cm2 (or even higher) for short periods of time. The term “ultrasound” as used in this specification is intended to encompass diagnostic, therapeutic and focused ultrasound.

[0208] Focused ultrasound (FUS) allows thermal energy to be delivered without an invasive probe (see Morocz et al 1998 Journal of Magnetic Resonance Imaging Vol. 8, No. 1, pp. 136-142. Another form of focused ultrasound is high intensity focused ultrasound (HIFU) which is reviewed by Moussatov et al in Ultrasonics (1998) Vol. 36, No. 8, pp. 893-900 and TranHuuHue et al in Acustica (1997) Vol. 83, No. 6, pp. 1103-1106.

[0209] Preferably, a combination of diagnostic ultrasound and a therapeutic ultrasound is employed. This combination is not intended to be limiting, however, and the skilled reader will appreciate that any variety of combinations of ultrasound may be used. Additionally, the energy density, frequency of ultrasound, and period of exposure may be varied.

[0210] Preferably the exposure to an ultrasound energy source is at a power density of from about 0.05 to about 100 Wcm-2. Even more preferably, the exposure to an ultrasound energy source is at a power density of from about 1 to about 15 Wcm-2.

[0211] Preferably, the exposure to an ultrasound energy source is at a frequency of from about 0.015 to about 10.0 MHz. More preferably the exposure to an ultrasound energy source is at a frequency of from about 0.02 to about 5.0 MHz or about 6.0 MHz. Most preferably, the ultrasound is applied at a frequency of 3 MHz.

[0212] Preferably, the exposure is for periods of from about 10 milliseconds to about 60 minutes. Preferably the exposure is for periods of from about 1 second to about 5 minutes. More preferably, the ultrasound is applied for about 2 minutes. Depending on the particular target cell to be disrupted, however, the exposure may be for a longer duration, for example, for 15 minutes.

[0213] Advantageously, the target tissue is exposed to an ultrasound energy source at an acoustic power density of from about 0.05 Wcm-2 to about 10 Wcm-2 with a frequency ranging from about 0.015 to about 10 MHz (see WO 98/52609). However, alternatives are also possible, for example, exposure to an ultrasound energy source at an acoustic power density of above 100 Wcm-2, but for reduced periods of time, for example, 1000 Wcm-2 for periods in the millisecond range or less.

[0214] Preferably the application of the ultrasound is in the form of multiple pulses; thus, both continuous wave and pulsed wave (pulsatile delivery of ultrasound) may be employed in any combination. For example, continuous wave ultrasound may be applied, followed by pulsed wave ultrasound, or vice versa. This may be repeated any number of times, in any order and combination. The pulsed wave ultrasound may be applied against a background of continuous wave ultrasound, and any number of pulses may be used in any number of groups.

[0215] Preferably, the ultrasound may comprise pulsed wave ultrasound. In a highly preferred embodiment, the ultrasound is applied at a power density of 0.7 Wcm-2 or 1.25 Wcm-2 as a continuous wave. Higher power densities may be employed if pulsed wave ultrasound is used.

[0216] Use of ultrasound is advantageous as, like light, it may be focused accurately on a target. Moreover, ultrasound is advantageous as it may be focused more deeply into tissues unlike light. It is therefore better suited to whole-tissue penetration (such as, but not limited to, a lobe of the liver) or whole organ (such as but not limited to the entire liver or an entire muscle, such as the heart) therapy. Another important advantage is that ultrasound is a non-invasive stimulus which is used in a wide variety of diagnostic and therapeutic applications. By way of example, ultrasound is well known in medical imaging techniques and, additionally, in orthopedic therapy. Furthermore, instruments suitable for the application of ultrasound to a subject vertebrate are widely available and their use is well known in the art.

[0217] In particular embodiments, the guide molecule is modified by a secondary structure to increase the specificity of the CRISPR-Cas system and the secondary structure can protect against exonuclease activity and allow for 5′ additions to the guide sequence also referred to herein as a protected guide molecule.

[0218] In one aspect, the invention provides for hybridizing a “protector RNA” to a sequence of the guide molecule, wherein the “protector RNA” is an RNA strand complementary to the 3′ end of the guide molecule to thereby generate a partially double-stranded guide RNA. In an embodiment of the invention, protecting mismatched bases (i.e. the bases of the guide molecule which do not form part of the guide sequence) with a perfectly complementary protector sequence decreases the likelihood of target RNA binding to the mismatched basepairs at the 3′ end. In particular embodiments of the invention, additional sequences comprising an extended length may also be present within the guide molecule such that the guide comprises a protector sequence within the guide molecule. This “protector sequence” ensures that the guide molecule comprises a “protected sequence” in addition to an “exposed sequence” (comprising the part of the guide sequence hybridizing to the target sequence). In particular embodiments, the guide molecule is modified by the presence of the protector guide to comprise a secondary structure such as a hairpin. Advantageously, there are three or four to thirty or more, e.g., about 10 or more, contiguous base pairs having complementarity to the protected sequence, the guide sequence or both. It is advantageous that the protected portion does not impede thermodynamics of the CRISPR-Cas system interacting with its target. By providing such an extension including a partially double stranded guide molecule, the guide molecule is considered protected and results in improved specific binding of the CRISPR-Cas complex, while maintaining specific activity.

[0219] In particular embodiments, use is made of a truncated guide (tru-guide), i.e. a guide molecule which comprises a guide sequence which is truncated in length with respect to the canonical guide sequence length. As described by Nowak et al. (Nucleic Acids Res (2016) 44 (20): 9555-9564), such guides may allow catalytically active CRISPR-Cas enzyme to bind its target without cleaving the target RNA. In particular embodiments, a truncated guide is used which allows the binding of the target but retains only nickase activity of the CRISPR-Cas enzyme.

[0220] The guide molecule and tracr molecules discussed above may comprise DNA, RNA, DNA/RNA hybrids, nucleic acid analogues such as, but not limited to, peptide nucleic acids (PNA), locked nucleic acids (LNA), unlocked nucleic acids (UNA), or triazole-linked DNA.

[0221] With respect to general information on CRISPR-Cas systems, components thereof, and delivery of such components, including methods, materials, delivery vehicles, vectors, particles, AAV, and making and using thereof, including as to amounts and formulations, all useful in the practice of the instant invention, reference is made to: U.S. Pat. Nos. 8,697,359, 8,771,945, 8,795,965, 8,865,406, 8,871,445, 8,889,356, 8,889,418, 8,895,308, 8,906,616, 8,932,814, 8,945,839, 8,993,233 and 8,999,641; US Patent Publications US 2014-0310830 (U.S. application Ser. No. 14/105,031), US 2014-0287938 A1 (U.S. application Ser. No. 14/213,991), US 2014-0273234 A1 (U.S. application Ser. No. 14/293,674), US2014-0273232 A1 (U.S. application Ser. No. 14/290,575), US 2014-0273231 (U.S. application Ser. No. 14/259,420), US 2014-0256046 A1 (U.S. application Ser. No. 14/226,274), US 2014-0248702 A1 (U.S. application Ser. No. 14/258,458), US 2014-0242700 A1 (U.S. application Ser. No. 14/222,930), US 2014-0242699 A1 (U.S. application Ser. No. 14/183,512), US 2014-0242664 A1 (U.S. application Ser. No. 14/104,990), US 2014-0234972 A1 (U.S. application Ser. No. 14/183,471), US 2014-0227787 A1 (U.S. application Ser. No. 14/256,912), US 2014-0189896 A1 (U.S. application Ser. No. 14/105,035), US 2014-0186958 (U.S. application Ser. No. 14/105,017), US 2014-0186919 A1 (U.S. application Ser. No. 14/104,977), US 2014-0186843 A1 (U.S. application Ser. No. 14/104,900), US 2014-0179770 A1 (U.S. application Ser. No. 14/104,837) and US 2014-0179006 A1 (U.S. application Ser. No. 14/183,486), US 2014-0170753 (U.S. application Ser. No. 14/183,429); US 2015-0184139 (U.S. application Ser. No. 14/324,960); 14/054,414 European Patent Applications EP 2 771 468 (EP13818570.7), EP 2 764 103 (EP13824232.6), and EP 2 784 162 (EP14170383.5); and PCT Patent Publications WO 2014/093661 (PCT/US2013/074743), WO 2014/093694 (PCT/US2013/074790), WO 2014/093595 (PCT/US2013/074611), WO 2014/093718 (PCT/US2013/074825), WO 2014/093709 (PCT/US2013/074812), WO 2014/093622 (PCT/US2013/074667), WO 2014/093635 (PCT/US2013/074691), WO 2014/093655 (PCT/US2013/074736), WO 2014/093712 (PCT/US2013/074819), WO 2014/093701 (PCT/US2013/074800), WO 2014/018423 (PCT/US2013/051418), WO 2014/204723 (PCT/US2014/041790), WO 2014/204724 (PCT/US2014/041800), WO 2014/204725 (PCT/US2014/041803), WO 2014/204726 (PCT/US2014/041804), WO 2014/204727 (PCT/US2014/041806), WO 2014/204728 (PCT/US2014/041808), WO 2014/204729 (PCT/US2014/041809), WO 2015/089351 (PCT/US2014/069897), WO 2015/089354 (PCT/US2014/069902), WO 2015/089364 (PCT/US2014/069925), WO 2015/089427 (PCT/US2014/070068), WO 2015/089462 (PCT/US2014/070127), WO 2015/089419 (PCT/US2014/070057), WO 2015/089465 (PCT/US2014/070135), WO 2015/089486 (PCT/US2014/070175), PCT/US2015/051691, PCT/US2015/051830. Reference is also made to U.S. provisional patent applications 61/758,468; 61/802,174; 61/806,375; 61/814,263; 61/819,803 and 61/828,130, filed on Jan. 30, 2013; Mar. 15, 2013; Mar. 28, 2013; Apr. 20, 2013; May 6, 2013 and May 28, 2013 respectively. Reference is also made to U.S. provisional patent application 61/836,123, filed on Jun. 17, 2013. Reference is additionally made to U.S. provisional patent applications 61/835,931, 61/835,936, 61/835,973, 61/836,080, 61/836,101, and 61/836,127, each filed Jun. 17, 2013. Further reference is made to U.S. provisional patent applications 61/862,468 and 61/862,355 filed on Aug. 5, 2013; 61/871,301 filed on Aug. 28, 2013; 61/960,777 filed on Sep. 25, 2013 and 61/961,980 filed on Oct. 28, 2013. Reference is yet further made to: PCT/US2014/62558 filed Oct. 28, 2014, and U.S. Provisional Patent Applications Ser. Nos. 61/915,148, 61/915,150, 61/915,153, 61/915,203, 61/915,251, 61/915,301, 61/915,267, 61/915,260, and 61/915,397, each filed Dec. 12, 2013; 61/757,972 and 61/768,959, filed on Jan. 29, 2013 and Feb. 25, 2013; 62/010,888 and 62/010,879, both filed Jun. 11, 2014; 62/010,329, 62/010,439 and 62/010,441, each filed Jun. 10, 2014; 61/939,228 and 61/939,242, each filed Feb. 12, 2014; 61/980,012, filed Apr. 15,2014; 62/038,358, filed Aug. 17, 2014; 62/055,484, 62/055,460 and 62/055,487, each filed Sep. 25, 2014; and 62/069,243, filed Oct. 27, 2014. Reference is made to PCT application designating, inter alia, the United States, application No. PCT/US14/41806, filed Jun. 10, 2014. Reference is made to U.S. provisional patent application 61/930,214 filed on Jan. 22, 2014. Reference is made to PCT application designating, inter alia, the United States, application No. PCT/US14/41806, filed Jun. 10, 2014.

[0222] Mention is also made of U.S. application 62/180,709, 17-Jun.-15, PROTECTED GUIDE RNAS (PGRNAS); U.S. application 62/091,455, filed, 12-Dec-14, PROTECTED GUIDE RNAS (PGRNAS); U.S. application 62/096,708, 24-Dec-14, PROTECTED GUIDE RNAS (PGRNAS); U.S. applications 62/091,462, 12-Dec-14, 62/096,324, 23-Dec-14, 62/180,681, 17 Jun. 2015, and 62/237,496, 5 Oct. 2015, DEAD GUIDES FOR CRISPR TRANSCRIPTION FACTORS; U.S. application 62/091,456, 12-Dec-14 and 62/180,692, 17-Jun. 2015, ESCORTED AND FUNCTIONALIZED GUIDES FOR CRISPR-CAS SYSTEMS; U.S. application 62/091,461, 12-Dec-14, DELIVERY, USE AND THERAPEUTIC APPLICATIONS OF THE CRISPR-CAS SYSTEMS AND COMPOSITIONS FOR GENOME EDITING AS TO HEMATOPOETIC STEM CELLS (HSCs); U.S. application 62/094,903, 19-Dec-14, UNBIASED IDENTIFICATION OF DOUBLE-STRAND BREAKS AND GENOMIC REARRANGEMENT BY GENOME-WISE INSERT CAPTURE SEQUENCING; U.S. application 62/096,761, 24-Dec-14, ENGINEERING OF SYSTEMS, METHODS AND OPTIMIZED ENZYME AND GUIDE SCAFFOLDS FOR SEQUENCE MANIPULATION; U.S. application 62/098,059, 30-Dec-14, 62/181,641, 18 Jun. 2015, and 62/181,667, 18 Jun. 2015, RNA-TARGETING SYSTEM; U.S. application 62/096,656, 24-Dec-14 and 62/181,151, 17 Jun. 2015, CRISPR HAVING OR ASSOCIATED WITH DESTABILIZATION DOMAINS; U.S. application 62/096,697, 24-Dec-14, CRISPR HAVING OR ASSOCIATED WITH AAV; U.S. application 62/098,158, 30-Dec-14, ENGINEERED CRISPR COMPLEX INSERTIONAL TARGETING SYSTEMS; U.S. application 62/151,052, 22-Apr-15, CELLULAR TARGETING FOR EXTRACELLULAR EXOSOMAL REPORTING; U.S. application 62/054,490, 24-Sep. 14, DELIVERY, USE AND THERAPEUTIC APPLICATIONS OF THE CRISPR-CAS SYSTEMS AND COMPOSITIONS FOR TARGETING DISORDERS AND DISEASES USING PARTICLE DELIVERY COMPONENTS; U.S. application 61/939,154, 12-FEB-14, SYSTEMS, METHODS AND COMPOSITIONS FOR SEQUENCE MANIPULATION WITH OPTIMIZED FUNCTIONAL CRISPR-CAS SYSTEMS; U.S. application 62/055,484, 25-Sep. 14, SYSTEMS, METHODS AND COMPOSITIONS FOR SEQUENCE MANIPULATION WITH OPTIMIZED FUNCTIONAL CRISPR-CAS SYSTEMS; U.S. application 62/087,537, 4-Dec-14, SYSTEMS, METHODS AND COMPOSITIONS FOR SEQUENCE MANIPULATION WITH OPTIMIZED FUNCTIONAL CRISPR-CAS SYSTEMS; U.S. application 62/054,651, 24-Sep. 14, DELIVERY, USE AND THERAPEUTIC APPLICATIONS OF THE CRISPR-CAS SYSTEMS AND COMPOSITIONS FOR MODELING COMPETITION OF MULTIPLE CANCER MUTATIONS IN VIVO; U.S. application 62/067,886, 23-Oct-14, DELIVERY, USE AND THERAPEUTIC APPLICATIONS OF THE CRISPR-CAS SYSTEMS AND COMPOSITIONS FOR MODELING COMPETITION OF MULTIPLE CANCER MUTATIONS IN VIVO; U.S. applications 62/054,675, 24-Sep. 14 and 62/181,002, 17 Jun. 2015, DELIVERY, USE AND THERAPEUTIC APPLICATIONS OF THE CRISPR-CAS SYSTEMS AND COMPOSITIONS IN NEURONAL CELLS/TISSUES; U.S. application 62/054,528, 24-Sep. 14, DELIVERY, USE AND THERAPEUTIC APPLICATIONS OF THE CRISPR-CAS SYSTEMS AND COMPOSITIONS IN IMMUNE DISEASES OR DISORDERS; U.S. application 62/055,454, 25-Sep. 14, DELIVERY, USE AND THERAPEUTIC APPLICATIONS OF THE CRISPR-CAS SYSTEMS AND COMPOSITIONS FOR TARGETING DISORDERS AND DISEASES USING CELL PENETRATION PEPTIDES (CPP); U.S. application 62/055,460, 25-Sep. 14, MULTIFUNCTIONAL-CRISPR COMPLEXES AND/OR OPTIMIZED ENZYME LINKED FUNCTIONAL-CRISPR COMPLEXES; U.S. application 62/087,475, 4-Dec-14 and 62/181,690, 18 Jun. 2015, FUNCTIONAL SCREENING WITH OPTIMIZED FUNCTIONAL CRISPR-CAS SYSTEMS; U.S. application 62/055,487, 25-Sep. 14, FUNCTIONAL SCREENING WITH OPTIMIZED FUNCTIONAL CRISPR-CAS SYSTEMS; U.S. application 62/087,546, 4-Dec-14 and 62/181,687, 18 Jun. 2015, MULTIFUNCTIONAL CRISPR COMPLEXES AND/OR OPTIMIZED ENZYME LINKED FUNCTIONAL-CRISPR COMPLEXES; and U.S. application 62/098,285, 30-Dec-14, CRISPR MEDIATED IN VIVO MODELING AND GENETIC SCREENING OF TUMOR GROWTH AND METASTASIS.

[0223] Mention is made of U.S. applications 62/181,659, 18 Jun. 2015 and 62/207,318, 19-Aug. 2015, ENGINEERING AND OPTIMIZATION OF SYSTEMS, METHODS, ENZYME AND GUIDE SCAFFOLDS OF CAS9 ORTHOLOGS AND VARIANTS FOR SEQUENCE MANIPULATION. Mention is made of U.S. applications 62/181,663, 18 Jun. 2015 and 62/245,264, 22 Oct. 2015, NOVEL CRISPR ENZYMES AND SYSTEMS, U.S. applications 62/181,675, 18 Jun. 2015, 62/285,349, 22 Oct. 2015, 62/296,522, 17 Feb. 2016, and 62/320,231, 8 Apr. 2016, NOVEL CRISPR ENZYMES AND SYSTEMS, U.S. application 62/232,067, 24 Sep. 2015, U.S. application Ser. No. 14/975,085, 18 Dec. 2015, European application No. 16150428.7, U.S. application 62/205,733, 16 Aug. 2015, U.S. application 62/201,542, 5-Aug. 2015, U.S. application 62/193,507, 16 Jul. 2015, and U.S. application 62/181,739, 18 Jun. 2015, each entitled NOVEL CRISPR ENZYMES AND SYSTEMS and of U.S. application 62/245,270, 22 Oct. 2015, NOVEL CRISPR ENZYMES AND SYSTEMS. Mention is also made of U.S. application 61/939,256, 12 Feb. 2014, and WO 2015/089473 (PCT/US2014/070152), 12 Dec. 2014, each entitled ENGINEERING OF SYSTEMS, METHODS AND OPTIMIZED GUIDE COMPOSITIONS WITH NEW ARCHITECTURES FOR SEQUENCE MANIPULATION. Mention is also made of PCT/US2015/045504, 15-Aug. 2015, U.S. application 62/180,699, 17 Jun. 2015, and U.S. application 62/038,358, 17 Aug. 2014, each entitled GENOME EDITING USING CAS9 NICKASES.

[0224] In addition, mention is made of PCT application PCT/US14/70057, Attorney Reference 47627.99.2060 and BI-2013/107 entitled “DELIVERY, USE AND THERAPEUTIC APPLICATIONS OF THE CRISPR-CAS SYSTEMS AND COMPOSITIONS FOR TARGETING DISORDERS AND DISEASES USING PARTICLE DELIVERY COMPONENTS (claiming priority from one or more or all of US provisional patent applications: 62/054,490, filed Sep. 24, 2014; 62/010,441, filed Jun. 10, 2014; and 61/915,118, 61/915,215 and 61/915,148, each filed on Dec. 12, 2013) (“the Particle Delivery PCT”), incorporated herein by reference, and of PCT application PCT/US14/70127, Attorney Reference 47627.99.2091 and BI-2013/101 entitled “DELIVERY, USE AND THERAPEUTIC APPLICATIONS OF THE CRISPR-CAS SYSTEMS AND COMPOSITIONS FOR GENOME EDITING” (claiming priority from one or more or all of US provisional patent applications: 61/915,176; 61/915,192; 61/915,215; 61/915,107, 61/915,145; 61/915,148; and 61/915,153 each filed Dec. 12, 2013) (“the Eye PCT”), incorporated herein by reference, with respect to a method of preparing an sgRNA-and-Type V effector protein containing particle comprising admixing a mixture comprising an sgRNA and Type V effector protein (and optionally HDR template) with a mixture comprising or consisting essentially of or consisting of surfactant, phospholipid, biodegradable polymer, lipoprotein and alcohol; and particles from such a process. For example, wherein Type V effector protein and sgRNA were mixed together at a suitable, e.g., 3:1 to 1:3 or 2:1 to 1:2 or 1:1 molar ratio, at a suitable temperature, e.g., 15-30° C., e.g., 20-25° C., e.g., room temperature, for a suitable time, e.g., 15-45, such as 30 minutes, advantageously in sterile, nuclease free buffer, e.g., 1×PBS. Separately, particle components such as or comprising: a surfactant, e.g., cationic lipid, e.g., 1,2-dioleoyl-3-trimethylammonium-propane (DOTAP); phospholipid, e.g., dimyristoylphosphatidylcholine (DMPC); biodegradable polymer, such as an ethylene-glycol polymer or PEG, and a lipoprotein, such as a low-density lipoprotein, e.g., cholesterol were dissolved in an alcohol, advantageously a C1-6 alkyl alcohol, such as methanol, ethanol, isopropanol, e.g., 100% ethanol. The two solutions were mixed together to form particles containing the Cas9-sgRNA complexes. Accordingly, sgRNA may be pre-complexed with the Type V effector protein, before formulating the entire complex in a particle. Formulations may be made with a different molar ratio of different components known to promote delivery of nucleic acids into cells (e.g. 1,2-dioleoyl-3-trimethylammonium-propane (DOTAP), 1,2-ditetradecanoyl-sn-glycero-3-phosphocholine (DMPC), polyethylene glycol (PEG), and cholesterol) For example DOTAP: DMPC: PEG: Cholesterol Molar Ratios may be DOTAP 100, DMPC 0, PEG 0, Cholesterol 0; or DOTAP 90, DMPC 0, PEG 10, Cholesterol 0; or DOTAP 90, DMPC 0, PEG 5, Cholesterol 5. DOTAP 100, DMPC 0, PEG 0, Cholesterol 0.

### Other Exemplary Nucleotide-Binding Systems and Proteins

[0225] In one example embodiment, the nucleotide-binding molecule may be one or more components of systems that are not a CRISPR-Cas system. Examples of the other nucleotide-binding molecules may be components of transcription activator-like effector (TALE) (e.g., TALE nuclease (TALEN)), Zn finger proteins (e.g., Zn finger nucleases), meganucleases, a functional fragment thereof, a variant thereof, or any combination thereof.

### TALE Systems

[0226] In one example embodiment, the nucleotide-binding protein may be a transcription activator-like effector nuclease, a functional fragment thereof, or a variant thereof. The present disclosure may also include nucleotide sequences that are or encode one or more components of a TALE system. As disclosed herein editing can be made by way of the transcription activator-like effector nucleases (TALENs) system. Transcription activator-like effectors (TALEs) can be engineered to bind practically any desired DNA sequence. Exemplary methods of genome editing using the TALEN system can be found for example in Cermak T. Doyle E L. Christian M. Wang L. Zhang Y. Schmidt C, et al. Efficient design and assembly of custom TALEN and other TAL effector-based constructs for DNA targeting. Nucleic Acids Res. 2011; 39:e82; Zhang F. Cong L. Lodato S. Kosuri S. Church G M. Arlotta P Efficient construction of sequence-specific TAL effectors for modulating mammalian transcription. Nat Biotechnol. 2011; 29:149-153 and U.S. Pat. Nos. 8,450,471, 8,440,431 and 8,440,432, all of which are specifically incorporated by reference.

[0227] In one example embodiment, provided herein include isolated, non-naturally occurring, recombinant or engineered DNA binding proteins that comprise TALE monomers as a part of their organizational structure that enable the targeting of nucleic acid sequences with improved efficiency and expanded specificity.

[0228] Naturally occurring TALEs or “wild type TALEs” are nucleic acid binding proteins secreted by numerous species of proteobacteria. TALE polypeptides contain a nucleic acid binding domain composed of tandem repeats of highly conserved monomer polypeptides that are predominantly 33, 34 or 35 amino acids in length and that differ from each other mainly in amino acid positions 12 and 13. In advantageous embodiments the nucleic acid is DNA. As used herein, the term “polypeptide monomers”, or “TALE monomers” will be used to refer to the highly conserved repetitive polypeptide sequences within the TALE nucleic acid binding domain and the term “repeat variable di-residues” or “RVD” will be used to refer to the highly variable amino acids at positions 12 and 13 of the polypeptide monomers. As provided throughout the disclosure, the amino acid residues of the RVD are depicted using the IUPAC single letter code for amino acids. A general representation of a TALE monomer which is comprised within the DNA binding domain is X₁₋₁₁₋(X₁₂X₁₃)-X₁₄₋₃₃ or ₃₄ or ₃₅, where the subscript indicates the amino acid position and X represents any amino acid. X₁₂X₁₃ indicate the RVDs. In some polypeptide monomers, the variable amino acid at position 13 is missing or absent and in such polypeptide monomers, the RVD consists of a single amino acid. In such cases the RVD may be alternatively represented as X*, where X represents X₁₂ and (*) indicates that X₁₃ is absent. The DNA binding domain comprises several repeats of TALE monomers and this may be represented as (X₁₋₁₁-(X₁₂X₁₃)-X₁₄₋₃₃ or ₃₄ or ₃₅)z, where in an advantageous embodiment, z is at least 5 to 40. In a further advantageous embodiment, z is at least 10 to 26.

[0229] The TALE monomers have a nucleotide binding affinity that is determined by the identity of the amino acids in its RVD. For example, polypeptide monomers with an RVD of NI preferentially bind to adenine (A), polypeptide monomers with an RVD of NG preferentially bind to thymine (T), polypeptide monomers with an RVD of HD preferentially bind to cytosine (C) and polypeptide monomers with an RVD of NN preferentially bind to both adenine (A) and guanine (G). In yet another embodiment of the invention, polypeptide monomers with an RVD of IG preferentially bind to T. Thus, the number and order of the polypeptide monomer repeats in the nucleic acid binding domain of a TALE determines its nucleic acid target specificity. In still further embodiments of the invention, polypeptide monomers with an RVD of NS recognize all four base pairs and may bind to A, T, G or C. The structure and function of TALEs is further described in, for example, Moscou et al., Science 326:1501 (2009); Boch et al., Science 326:1509-1512 (2009); and Zhang et al., Nature Biotechnology 29:149-153 (2011), each of which is incorporated by reference in its entirety.

[0230] The TALE polypeptides used in methods of the invention are isolated, non-naturally occurring, recombinant or engineered nucleic acid-binding proteins that have nucleic acid or DNA binding regions containing polypeptide monomer repeats that are designed to target specific nucleic acid sequences.

[0231] As described herein, polypeptide monomers having an RVD of HN or NH preferentially bind to guanine and thereby allow the generation of TALE polypeptides with high binding specificity for guanine containing target nucleic acid sequences. In a preferred embodiment of the invention, polypeptide monomers having RVDs RN, NN, NK, SN, NH, KN, HN, NQ, HH, RG, KH, RH and SS preferentially bind to guanine. In a much more advantageous embodiment of the invention, polypeptide monomers having RVDs RN, NK, NQ, HH, KH, RH, SS and SN preferentially bind to guanine and thereby allow the generation of TALE polypeptides with high binding specificity for guanine containing target nucleic acid sequences. In an even more advantageous embodiment of the invention, polypeptide monomers having RVDs HH, KH, NH, NK, NQ, RH, RN and SS preferentially bind to guanine and thereby allow the generation of TALE polypeptides with high binding specificity for guanine containing target nucleic acid sequences. In a further advantageous embodiment, the RVDs that have high binding specificity for guanine are RN, NH RH and KH. Furthermore, polypeptide monomers having an RVD of NV preferentially bind to adenine and guanine. In more preferred embodiments of the invention, polypeptide monomers having RVDs of H*, HA, KA, N*, NA, NC, NS, RA, and S* bind to adenine, guanine, cytosine and thymine with comparable affinity.

[0232] The predetermined N-terminal to C-terminal order of the one or more polypeptide monomers of the nucleic acid or DNA binding domain determines the corresponding predetermined target nucleic acid sequence to which the TALE polypeptides will bind. As used herein the polypeptide monomers and at least one or more half polypeptide monomers are “specifically ordered to target” the genomic locus or gene of interest. In plant genomes, the natural TALE-binding sites always begin with a thymine (T), which may be specified by a cryptic signal within the non-repetitive N-terminus of the TALE polypeptide; in some cases this region may be referred to as repeat 0. In animal genomes, TALE binding sites do not necessarily have to begin with a thymine (T) and TALE polypeptides may target DNA sequences that begin with T, A, G or C. The tandem repeat of TALE monomers always ends with a half-length repeat or a stretch of sequence that may share identity with only the first 20 amino acids of a repetitive full length TALE monomer and this half repeat may be referred to as a half-monomer, which is included in the term “TALE monomer”. Therefore, it follows that the length of the nucleic acid or DNA being targeted is equal to the number of full polypeptide monomers plus two.

[0233] As described in Zhang et al., Nature Biotechnology 29:149-153 (2011), TALE polypeptide binding efficiency may be increased by including amino acid sequences from the “capping regions” that are directly N-terminal or C-terminal of the DNA binding region of naturally occurring TALEs into the engineered TALEs at positions N-terminal or C-terminal of the engineered TALE DNA binding region. Thus, in certain embodiments, the TALE polypeptides described herein further comprise an N-terminal capping region and/or a C-terminal capping region.

[0234] An exemplary amino acid sequence of a N-terminal capping region is:

(SEQ ID NO: 458)
M D P I R S R T P S P A R E L L S G P Q P D G V Q
P T A D R G V S P P A G G P L D G L P A R R T M S
R T R L P S P P A P S P A F S A D S F S D L L R Q
F D P S L F N T S L F D S L P P F G A H H T E A A
T G E W D E V Q S G L R A A D A P P P T M R V A V
T A A R P P R A K P A P R R R A A Q P S D A S P A
A Q V D L R T L G Y S Q Q Q Q E K I K P K V R S T
V A Q H H E A L V G H G F T H A H I V A L S Q H P
A A L G T V A V K Y Q D M I A A L P E A T H E A I
V G V G K Q W S G A R A L E A L L T V A G E L R G
P P L Q L D T G Q L L K I A K R G G V T A V E A V
H A W R N A L T G A P L N

[0235] An exemplary amino acid sequence of a C-terminal capping region is:

(SEQ ID NO: 459)
R P A L E S I V A Q L S R P D P A L A A L T N D H
L V A L A C L G G R P A L D A V K K G L P H A P A
L I K R T N R R I P E R T S H R V A D H A Q V V R
V L G F F Q C H S H P A Q A F D D A M T Q F G M S
R H G L L Q L F R R V G V T E L E A R S G T L P P
A S Q R W D R I L Q A S G M K R A K P S P T S T Q
T P D Q A S L H A F A D S L E R D L D A P S P M H
E G D Q T R A S

[0236] As used herein, the predetermined “N-terminus” to “C terminus” orientation of the N-terminal capping region, the DNA binding domain comprising the repeat TALE monomers and the C-terminal capping region provide structural basis for the organization of different domains in the d-TALEs or polypeptides of the invention.

[0237] The entire N-terminal and/or C-terminal capping regions are not necessary to enhance the binding activity of the DNA binding region. Therefore, in certain embodiments, fragments of the N-terminal and/or C-terminal capping regions are included in the TALE polypeptides described herein.

[0238] In certain embodiments, the TALE polypeptides described herein contain a N-terminal capping region fragment that included at least 10, 20, 30, 40, 50, 54, 60, 70, 80, 87, 90, 94, 100, 102, 110, 117, 120, 130, 140, 147, 150, 160, 170, 180, 190, 200, 210, 220, 230, 240, 250, 260 or 270 amino acids of an N-terminal capping region. In certain embodiments, the N-terminal capping region fragment amino acids are of the C-terminus (the DNA-binding region proximal end) of an N-terminal capping region. As described in Zhang et al., Nature Biotechnology 29:149-153 (2011), N-terminal capping region fragments that include the C-terminal 240 amino acids enhance binding activity equal to the full length capping region, while fragments that include the C-terminal 147 amino acids retain greater than 80% of the efficacy of the full length capping region, and fragments that include the C-terminal 117 amino acids retain greater than 50% of the activity of the full-length capping region.

[0239] In one example embodiment, the TALE polypeptides described herein contain a C-terminal capping region fragment that included at least 6, 10, 20, 30, 37, 40, 50, 60, 68, 70, 80, 90, 100, 110, 120, 127, 130, 140, 150, 155, 160, 170, 180 amino acids of a C-terminal capping region. In certain embodiments, the C-terminal capping region fragment amino acids are of the N-terminus (the DNA-binding region proximal end) of a C-terminal capping region. As described in Zhang et al., Nature Biotechnology 29:149-153 (2011), C-terminal capping region fragments that include the C-terminal 68 amino acids enhance binding activity equal to the full length capping region, while fragments that include the C-terminal 20 amino acids retain greater than 50% of the efficacy of the full length capping region.

[0240] In certain embodiments, the capping regions of the TALE polypeptides described herein do not need to have identical sequences to the capping region sequences provided herein. Thus, in one example embodiment, the capping region of the TALE polypeptides described herein have sequences that are at least 50%, 60%, 70%, 80%, 85%, 90%, 91%, 92%, 93%, 94%, 95%, 96%, 97%, 98% or 99% identical or share identity to the capping region amino acid sequences provided herein. Sequence identity is related to sequence homology. Homology comparisons may be conducted by eye, or more usually, with the aid of readily available sequence comparison programs. These commercially available computer programs may calculate percent (%) homology between two or more sequences and may also calculate the sequence identity shared by two or more amino acid or nucleic acid sequences. In some preferred embodiments, the capping region of the TALE polypeptides described herein have sequences that are at least 95% identical or share identity to the capping region amino acid sequences provided herein.

[0241] Sequence homologies may be generated by any of a number of computer programs known in the art, which include but are not limited to BLAST or FASTA. Suitable computer program for carrying out alignments like the GCG Wisconsin Bestfit package may also be used. Once the software has produced an optimal alignment, it is possible to calculate % homology, preferably % sequence identity. The software typically does this as part of the sequence comparison and generates a numerical result.

[0242] In one example embodiment described herein, the TALE polypeptides of the invention include a nucleic acid binding domain linked to the one or more effector domains. The terms “effector domain” or “regulatory and functional domain” refer to a polypeptide sequence that has an activity other than binding to the nucleic acid sequence recognized by the nucleic acid binding domain. By combining a nucleic acid binding domain with one or more effector domains, the polypeptides of the invention may be used to target the one or more functions or activities mediated by the effector domain to a particular target DNA sequence to which the nucleic acid binding domain specifically binds.

[0243] In one example embodiment of the TALE polypeptides described herein, the activity mediated by the effector domain is a biological activity. For example, in one example embodiment the effector domain is a transcriptional inhibitor (i.e., a repressor domain), such as an mSin interaction domain (SID). SID4X domain or a Krappel-associated box (KRAB) or fragments of the KRAB domain. In one example embodiment the effector domain is an enhancer of transcription (i.e. an activation domain), such as the VP16, VP64 or p65 activation domain. In one example embodiment, the nucleic acid binding is linked, for example, with an effector domain that includes, but is not limited to, a transposase, integrase, recombinase, resolvase, invertase, protease, DNA methyltransferase, DNA demethylase, histone acetylase, histone deacetylase, nuclease, transcriptional repressor, transcriptional activator, transcription factor recruiting, protein nuclear-localization signal or cellular uptake signal.

[0244] In one example embodiment, the effector domain is a protein domain which exhibits activities which include but are not limited to transposase activity, integrase activity, recombinase activity, resolvase activity, invertase activity, protease activity, DNA methyltransferase activity, DNA demethylase activity, histone acetylase activity, histone deacetylase activity, nuclease activity, nuclear-localization signaling activity, transcriptional repressor activity, transcriptional activator activity, transcription factor recruiting activity, or cellular uptake signaling activity. Other preferred embodiments of the invention may include any combination the activities described herein.

### Zn Finger Nucleases

[0245] In one example embodiment, the composition may comprise a Zn finger protein (e.g., a Zn finger nuclease), a functional fragment thereof, or a variant thereof. The composition may comprise one or more Zn-finger nucleases or nucleic acids encoding thereof. In some cases, the nucleotide sequences may comprise coding sequences for Zn-Finger nucleases. Other preferred tools for genome editing for use in the context of this invention include zinc finger systems and TALE systems. One type of programmable DNA-binding domain is provided by artificial zinc-finger (ZF) technology, which involves arrays of ZF modules to target new DNA-binding sites in the genome. Each finger module in a ZF array targets three DNA bases. A customized array of individual zinc finger domains is assembled into a ZF protein (ZFP).

[0246] ZFPs can comprise a functional domain. The first synthetic zinc finger nucleases (ZFNs) were developed by fusing a ZF protein to the catalytic domain of the Type IIS restriction enzyme Fokl. (Kim, Y. G. et al., 1994, Chimeric restriction endonuclease, Proc. Natl. Acad. Sci. U.S.A. 91, 883-887; Kim, Y. G. et al., 1996, Hybrid restriction enzymes: zinc finger fusions to Fok I cleavage domain. Proc. Natl. Acad. Sci. U.S.A. 93, 1156-1160). Increased cleavage specificity can be attained with decreased off target activity by use of paired ZFN heterodimers, each targeting different nucleotide sequences separated by a short spacer. (Doyon, Y. et al., 2011, Enhancing zinc-finger-nuclease activity with improved obligate heterodimeric architectures. Nat. Methods 8, 74-79). ZFPs can also be designed as transcription activators and repressors and have been used to target many genes in a wide variety of organisms. Exemplary methods of genome editing using ZFNs can be found for example in U.S. Pat. Nos. 6,534,261, 6,607,882, 6,746,838, 6,794,136, 6,824,978, 6,866,997, 6,933,113, 6,979,539, 7,013,219, 7,030,215, 7,220,719, 7,241,573, 7,241,574, 7,585,849, 7,595,376, 6,903,185, and 6,479,626, all of which are specifically incorporated by reference.

### Meganucleases

[0247] In one example embodiment, the composition may comprise a meganuclease, a functional fragment thereof, or a variant thereof. The composition may comprise one or more meganucleases or nucleic acids encoding thereof. As disclosed herein, editing can be made by way of meganucleases, which are endodeoxyribonucleases characterized by a large recognition site (double-stranded DNA sequences of 12 to 40 base pairs). In some cases, the nucleotide sequences may comprise coding sequences for meganucleases. Exemplary methods for using meganucleases can be found in U.S. Pat. Nos. 8,163,514; 8,133,697; 8,021,867; 8,119,361; 8,119,381; 8,124,369; and 8,129,134, which are specifically incorporated by reference.

[0248] In certain embodiments, any of the nucleases, including the modified nucleases as described herein, may be used in the methods, compositions, and kits according to the invention. In particular embodiments, nuclease activity of an unmodified nuclease may be compared with nuclease activity of any of the modified nucleases as described herein, e.g. to compare for instance off-target or on-target effects. Alternatively, nuclease activity (or a modified activity as described herein) of different modified nucleases may be compared, e.g. to compare for instance off-target or on-target effects.

### IscB

[0249] In one example embodiment, the nucleotide-binding proteins may be IscB proteins.

[0250] In an embodiment, the RNA-guide protein may be an IscB protein.

[0251] In an embodiment, the nucleic acid-guided nucleases herein may be IscB proteins. An IscB protein may comprise an X domain and a Y domain as described herein. The IscB proteins may form a complex with one or more guide molecules. The IscB proteins may form a complex with one or more hRNA molecules which serve as a scaffold molecule and comprise guide sequences. The IscB proteins may be CRISPR-associated proteins, e.g., the loci of the nucleases are associated with an CRISPR array, or the IscB proteins may not be CRISPR-associated.

[0252] Unless indicated otherwise, the term “IscB polypeptide” will be intended to include IscB, IsrB, and IshB. IscB polypeptides of the present invention may comprise a split RuvC nuclease domain comprising RuvC-1, Ruv-C II, and Ruv-C III subdomains. Some IscB proteins may further comprise a HNH endonuclease domain. In one example embodiment, the RuvC endoculease domain is split by the insertion of a bridge helix, a HNH domain, or both. However, unlike Cas9, IscB polypeptides do not contain a Rec domain. In addition, IscB polypeptides may further comprise a conserved N-terminal domain (also referred to herein as a PLMP domain), which is not present in Cas9 proteins. IscB proteins may also further comprise a conserved C-terminal domain.

[0253] The IscB proteins may be homolog or ortholog of IscB and TnpB proteins described in Kapitonov V V et al., ISC, a Novel Group of Bacterial and Archaeal DNA Transposons That Encode Cas9 Homologs, J Bacteriol. 2015 Dec. 28; 198(5):797-807. Doi: 10.1128/JB.00783-15; Koonin E V and Makarova K S, Mobile Genetic Elements and Evolution of CRISPR-Cas Systems: All the Way There and Back, Genome Biol Evol. 2017 October; 9(10): 2812-2825; Shmakov S et al., Discovery and Functional Characterization of Diverse Class 2 CRISPR-Cas Systems, Mol Cell. 2015 Nov. 5; 60(3):385-97, which are incorporated by reference herein in its entireties.

[0254] In embodiments, the IscBs may comprise one or more domains, e.g., one or more of a X domain (e.g., at N-terminus), a RuvC domain, a Bridge Helix domain, and a Y domain (e.g., at C-terminus). In some examples, the nucleic-acid guided nuclease comprises an N-terminal X domain, a RuvC domain (e.g., including a RuvC-I, RuvC-II, and RuvC-III subdomains), a Bridge Helix domain, and a C-terminal Y domain. In some examples, the nucleic-acid guided nuclease comprises In some examples, the nucleic-acid guided nuclease comprises an N-terminal X domain, a RuvC domain (e.g., including a RuvC-I, RuvC-II, and RuvC-III subdomains), a Bridge Helix domain, an HNH domain, and a C-terminal Y domain.

[0255] In embodiments, the nucleic acid-guided nucleases may have a small size. For example, the nucleic acid-guided nucleases may be no more than 50, no more than 100, no more than 150, no more than 200, no more than 250, no more than 300, no more than 350, no more than 400, no more than 450, no more than 500, no more than 550, no more than 600, no more than 650, no more than 700, no more than 750, no more than 800, no more than 850, no more than 900, no more than 950, or no more than 1000 amino acids in length.

[0256] In certain example embodiments, the IscB polypeptides are between 180 and 800 amino acids in size, between 200 and 790 amino acids in size, between 200 and 780 amino acids in size, between 200 and 770 amino acids in size, between 200 and 760 amino acids in size, between 200 and 750 amino acids in size, between 200 and 740 amino acids in size, between 200 and 730 amino acids in size, between 200 and 720 amino acids in size, between 200 and 720 amino acids in size, between 200 and 710 amino acids in size, between 200 and 700 amino acids in size, between 200 and 690 amino acids in size, between 200 and 680 amino acids in size, between 200 and 670 amino acids in size, between 200 and 660 amino acids in size, between 200 and 650 amino acids in size, between 200 and 640 amino acids in size, between 200 and 630 amino acids in size, between 200 and 620 amino acids in size, between 200 and 610 amino acids in size, between 200 and 600 amino acids in size, between 200 and 590 amino acids in size, between 200 and 580 amino acids in size, between 200 and 570 amino acids in size, between 200 and 560 amino acid, between 200 between 550 amino acids, between 200 and 540 amino acids, between 200 and 530 amino acids, between 200 and 520 amino acids, between 200 and 510 amino acids, between 200 and 500 amino acids, between 200 and 490 amino acids, between 200 and 480 amino acids, between 200 and 470 amino acids, between 200 and 460 amino acids, between 200 and 450 amino acids, between 200 and 440 amino acids, between 200 and 430 amino acids, between 200 and 420 amino acids, between 200 and 410 amino acids, between 200 and 400 amino acids, between 300 and 400 amino acids. Between 300 and 500 amino acids, between 300 and 600 amino acids, between 400 and 500 amino acids, or between 500-600 amino acids. In one example embodiment, the polypeptide may range in size from 400-500 amino acids, 400-490 amino acids, 400-480 amino acids, 400-470 amino acids, 400-460 amino acids, 400-450 amino acids, 400-440 amino acids, 400-430 amino acids. Size variation may be dependent, in part, on the particular domain architecture of the IscB or its homolog.

### Linkers

[0257] The transposition protein(s) and the nucleotide-binding protein(s) may be associated via a linker. The term “linker” refers to a molecule which joins the proteins to form a fusion protein. Generally, such molecules have no specific biological activity other than to join or to preserve some minimum distance or other spatial relationship between the proteins. However, in certain embodiments, the linker may be selected to influence some property of the linker and/or the fusion protein such as the folding, net charge, or hydrophobicity of the linker.

[0258] Suitable linkers for use in the methods herein include straight or branched-chain carbon linkers, heterocyclic carbon linkers, or peptide linkers. However, as used herein the linker may also be a covalent bond (carbon-carbon bond or carbon-heteroatom bond). In particular embodiments, the linker is used to separate the Cas protein and the transposition protein by a distance sufficient to ensure that each protein retains its required functional property. A peptide linker sequences may adopt a flexible extended conformation and do not exhibit a propensity for developing an ordered secondary structure. In certain embodiments, the linker can be a chemical moiety which can be monomeric, dimeric, multimeric or polymeric. Preferably, the linker comprises amino acids. Typical amino acids in flexible linkers include Gly, Asn and Ser. Accordingly, in particular embodiments, the linker comprises a combination of one or more of Gly, Asn and Ser amino acids. Other near neutral amino acids, such as Thr and Ala, also may be used in the linker sequence. Exemplary linkers are disclosed in Maratea et al. (1985), Gene 40: 39-46; Murphy et al. (1986) Proc. Nat'l. Acad. Sci. USA 83: 8258-62; U.S. Pat. Nos. 4,935,233; and 4,751,180. For example, GlySer linkers GGS, GGGS (SEQ ID NO: 460) or GSG can be used. GGS, GSG, GGGS (SEQ ID NO: 460) or GGGGS (SEQ ID NO: 461) linkers can be used in repeats of 3 (such as (GGS)₃ (SEQ ID NO: 462), (GGGGS)₃ (SEQ ID NO: 463)) or 5, 6, 7, 9 or even 12 or more, to provide suitable lengths. In some cases, the linker may be (GGGGS)₃₋₁₅(SEQ ID NO: 463-475), For example, in some cases, the linker may be (GGGGS)₃₋₁₁(SEQ ID NO: 463-471), e.g., GGGGS (SEQ ID NO: 461), (GGGGS)₂ (SEQ ID NO: 476), (GGGGS)₃ (SEQ ID NO: 463), (GGGGS)₄ (SEQ ID NO: 464), (GGGGS)₅ (SEQ ID NO: 465), (GGGGS)₆ (SEQ ID NO: 466), (GGGGS)₇ (SEQ ID NO: 467), (GGGGS)₈ (SEQ ID NO: 468), (GGGGS)₉ (SEQ ID NO: 469), (GGGGS)₁₀ (SEQ ID NO: 470), or (GGGGS)₁₁ (SEQ ID NO: 471).

[0259] In particular embodiments, linkers such as (GGGGS)_{3 3} (SEQ ID NO: 463) are preferably used herein. (GGGGS)₆ (SEQ ID NO: 466) (GGGGS)₉ (SEQ ID NO: 469) or (GGGGS)₁₂ (SEQ ID NO: 472) may preferably be used as alternatives. Other preferred alternatives are (GGGGS)₁ (SEQ ID NO: 461), (GGGGS)₂ (SEQ ID NO: 476), (GGGGS)₄ (SEQ ID NO: 464), (GGGGS)₅ (SEQ ID NO: 465), (GGGGS)₇ (SEQ ID NO: 467), (GGGGS)₈ (SEQ ID NO: 468), (GGGGS)₁₀ (SEQ ID NO: 470), or (GGGGS)ii (SEQ ID NO: 471). In yet a further embodiment, LEPGEKPYKCPECGKSFSQSGALTRHQRTHTR (SEQ ID NO: 477) is used as a linker. In particular embodiments, the CRISPR-cas protein is a Cas protein and is linked to the transposition protein or its catalytic domain by means of an LEPGEKPYKCPECGKSFSQSGALTRHQRTHTR (SEQ ID NO: 477) linker. In further particular embodiments, the Cas protein is linked C-terminally to the N-terminus of a transposition protein or its catalytic domain by means of an LEPGEKPYKCPECGKSFSQSGALTRHQRTHTR (SEQ ID NO: 477) linker. In addition, N- and C-terminal NLSs can also function as linker (e.g., PKKKRKVEASSPKKRKVEAS (SEQ ID NO: 478)).

[0260] In yet an additional embodiment, the linker is an XTEN linker. The linker may comprise one or more repeats of XTEN linkers, e.g., 1, 2, 3, 4, 5, 6, 7, 8, 9, 10, 11, 12, 13, 14, 15, 16, 17, 18, 19, 20, 21, 22, 23, 24, 25 26, 27, 28, 29, 30, 31 or 32 repeats of XTEN linkers.

[0261] Different transposition proteins may need linkers of different sizes to be associated with a Cas protein. For example, TsnB may need a longer linker than TnsQ when associated with a Cas protein.

[0262] Examples of linkers are shown in the Table 7 below.

TABLE 7

| | |
|---|---|
| GGS | GGTGGTAGT |
| GGSx3 | GGTGGTAGTGGAGGGAGCGGCGGTTCA (SEQ ID NO: 479) |
| (9) | |
| GGSx7 | ggtggaggaggctctggtggaggcggtagcggaggcggagggtc |
| (21) | gGGTGGTAGTGGAGGGAGCGGCGGTTCA |
| | (SEQ ID NO: 480) |
| XTEN | TCGGGATCTGAGACGCCTGGGACCTCGGAATCGGCTACGCCCGA |
| | AAGT (SEQ ID NO: 481) |
| Z- | Gtggataacaaatttaacaaagaaatgtgggcggcgtgggaaga |
| EGFR_ | aattcgtaacctgccgaacctgaacggctggcagatgaccgcgt |
| Short | ttattgcgagcctggtggatgatccgagccagagcgcgaacctg |
| | ctggcggaagcgaaaaaactgaacgatgcgcaggcgccgaaaac |
| | cggcggtggttctggt (SEQ ID NO: 482) |
| GSAT | Ggtggttctgccggtggctccggttctggctccagcggtggcag |
| | ctctggtgcgtccggcacgggtactgcgggtggcactggcagcg |
| | gttccggtactggctctggc (SEQ ID NO: 483) |

### Vector Systems

[0263] The present disclosure provides vector systems comprising one or more vectors. A vector may comprise one or more polynucleotides encoding components in the Cas associated transposases systems herein, or combination thereof. In a particular example, the present disclosure provides a single vector comprising all components of the Cas-associated transposition protein system or polynucleotides encoding the components. The vector may comprise a single promoter. In other embodiments, the system may comprise a plurality of vectors, each comprising one or some components the Cas-associated transposition protein system or polynucleotides encoding the components.

[0264] The one or more polynucleotides in the vector systems may comprise one or more regulatory elements operably configures to express the polypeptide(s) and/or the nucleic acid component(s), optionally wherein the one or more regulatory elements comprise inducible promoters. The polynucleotide molecule encoding the Cas polypeptide is codon optimized for expression in a eukaryotic cell.

[0265] Polynucleotides encoding the Cas and/or transposition protein(s) may be mutated to reduce or prevent early or pre-mature termination of translation. In one example embodiment, the polynucleotides encode RNA with poly-U stretches (e.g., in the 5′ end). Such polynucleotides may be mutated, e.g., in the sequences encoding the poly-U stretches, to reduce or prevent early or pre-mature termination.

[0266] As described previously and as used herein, a “vector” is a tool that allows or facilitates the transfer of an entity from one environment to another. It is a replicon, such as a plasmid, phage, or cosmid, into which another DNA segment may be inserted so as to bring about the replication of the inserted segment. Generally, a vector is capable of replication when associated with the proper control elements. The term “vector” includes cloning and expression vectors, as well as viral vectors and integrating vectors. An “expression vector” is a vector that includes one or more expression control sequences, and an “expression control sequence” is a DNA sequence that controls and regulates the transcription and/or translation of another DNA sequence. Suitable expression vectors include, without limitation, plasmids and viral vectors derived from, for example, bacteriophage, baculoviruses, tobacco mosaic virus, herpes viruses, cytomegalovirus, retroviruses, vaccinia viruses, adenoviruses, and adeno-associated viruses. Numerous vectors and expression systems are commercially available from such corporations as Novagen (Madison, WI), Clontech (Palo Alto, CA), Stratagene (La Jolla, CA), and Invitrogen/Life Technologies (Carlsbad, CA). By way of example, some vectors used in recombinant DNA techniques allow entities, such as a segment of DNA (such as a heterologous DNA segment, such as a heterologous cDNA segment), to be transferred into a target cell. The present invention comprehends recombinant vectors that may include viral vectors, bacterial vectors, protozoan vectors, DNA vectors, or recombinants thereof. With regards to recombination and cloning methods, mention is made of U.S. patent application Ser. No. 10/815,730, the contents of which are herein incorporated by reference in their entirety.

[0267] A vector may have one or more restriction endonuclease recognition sites (e.g., type I, II or Iis) at which the sequences may be cut in a determinable fashion without loss of an essential biological function of the vector, and into which a nucleic acid fragment may be spliced or inserted in order to bring about its replication and cloning. Vectors may also comprise one or more recombination sites that permit exchange of nucleic acid sequences between two nucleic acid molecules. Vectors may further provide primer sites, e.g., for PCR, transcriptional and/or translational initiation and/or regulation sites, recombinational signals, replicons, selectable markers, etc. A vector may further contain one or more selectable markers suitable for use in the identification of cells transformed with the vector.

[0268] As mentioned previously, vectors capable of directing the expression of genes and/or nucleic acid sequence to which they are operatively linked, in an appropriate host cell (e.g., a prokaryotic cell, eukaryotic cell, or mammalian cell), are referred to herein as “expression vectors.” If translation of the desired nucleic acid sequence is required, the vector also typically may comprise sequences required for proper translation of the nucleotide sequence. The term “expression” as used herein with regards to expression vectors, refers to the biosynthesis of a nucleic acid sequence product, i.e., to the transcription and/or translation of a nucleotide sequence. Expression also refers to biosynthesis of a microRNA or RNAi molecule, which refers to expression and transcription of an RNAi agent such as siRNA, shRNA, and antisense DNA, that do not require translation to polypeptide sequences.

[0269] In general, expression vectors of utility in the methods of generating and compositions which may comprise polypeptides of the invention described herein are often in the form of “plasmids,” which refer to circular double-stranded DNA loops which, in their vector form, are not bound to a chromosome. In one example embodiment of the aspects described herein, all components of a given polypeptide may be encoded in a single vector. For example, in one example embodiment, a vector may be constructed that contains or may comprise all components necessary for a functional polypeptide as described herein. In one example embodiment, individual components (e.g., one or more monomer units and one or more effector domains) may be separately encoded in different vectors and introduced into one or more cells separately. Moreover, any vector described herein may itself comprise predetermined Cas and/or retrotransposon polypeptides encoding component sequences, such as an effector domain and/or other polypeptides, at any location or combination of locations, such as 5′ to, 3′ to, or both 5′ and 3′ to the exogenous nucleic acid molecule which may comprise one or more component Cas and/or retrotransposon polypeptides encoding sequences to be cloned in. Such expression vectors are termed herein as which may comprise “backbone sequences.”

[0270] Several embodiments of the invention relate to vectors that include but are not limited to plasmids, episomes, bacteriophages, or viral vectors, and such vectors may integrate into a host cell's genome or replicate autonomously in the particular cellular system used. In one example embodiment of the compositions and methods described herein, the vector used is an episomal vector, i.e., a nucleic acid capable of extra-chromosomal replication and may include sequences from bacteria, viruses or phages. Other embodiments of the invention relate to vectors derived from bacterial plasmids, bacteriophages, yeast episomes, yeast chromosomal elements, and viruses, vectors derived from combinations thereof, such as those derived from plasmid and bacteriophage genetic elements, cosmids and phagemids. In one example embodiment, a vector may be a plasmid, bacteriophage, bacterial artificial chromosome (BAC) or yeast artificial chromosome (YAC). A vector may be a single- or double-stranded DNA, RNA, or phage vector.

[0271] Viral vectors include, but are not limited to, retroviral vectors, such as lentiviral vectors or gammaretroviral vectors, adenoviral vectors, and baculoviral vectors. For example, a lentiviral vector may be used in the form of lentiviral particles. Other forms of expression vectors known by those skilled in the art which serve equivalent functions may also be used. Expression vectors may be used for stable or transient expression of the polypeptide encoded by the nucleic acid sequence being expressed. A vector may be a self-replicating extrachromosomal vector or a vector which integrates into a host genome. One type of vector is a genomic integrated vector, or “integrated vector”, which may become integrated into the chromosomal DNA or RNA of a host cell, cellular system, or non-cellular system. In one example embodiment, the nucleic acid sequence encoding the Cas and/or retrotransposon polypeptides described herein, integrates into the chromosomal DNA or RNA of a host cell, cellular system, or non-cellular system along with components of the vector sequence.

[0272] The recombinant expression vectors used herein comprise a Cas and/or retrotransposon nucleic acid in a form suitable for expression of the nucleic acid in a host cell, which indicates that the recombinant expression vector(s) include one or more regulatory sequences, selected on the basis of the host cell(s) to be used for expression, which is operatively linked to the nucleic acid sequence to be expressed.

[0273] In advantageous embodiments of the invention, the expression vectors described herein may be introduced into host cells to thereby produce proteins or peptides, including fusion proteins or peptides, encoded by nucleic acids as described herein (e.g., Cas and/or retrotransposon polypeptides, or variant forms thereof).

[0274] In one example embodiment, the recombinant expression vectors which may comprise a nucleic acid encoding a Cas and/or transposition protein described herein further comprise a 5′UTR sequence and/or a 3′ UTR sequence, thereby providing the nucleic acid sequence transcribed from the expression vector additional stability and translational efficiency.

[0275] Certain embodiments of the invention may relate to the use of prokaryotic vectors and variants and derivatives thereof. Other embodiments of the invention may relate to the use of eukaryotic expression vectors. With regards to these prokaryotic and eukaryotic vectors, mention is made of U.S. Pat. No. 6,750,059, the contents of which are incorporated by reference herein in their entirety. Other embodiments of the invention may relate to the use of viral vectors, with regards to which mention is made of U.S. patent application Ser. No. 13/092,085, the contents of which are incorporated by reference herein in their entirety.

[0276] In one example embodiment of the aspects described herein, a Cas and/or transposition protein is expressed using a yeast expression vector. Examples of vectors for expression in yeast S. cerivisae include, but are not limited to, pYepSecl (Baldari, et al., (1987) EMBO J. 6:229-234), pMFa (Kurjan and Herskowitz, (1982) Cell 30:933-943), pJRY88 (Schultz et al., (1987) Gene 54:113-123), and pYES2 (Invitrogen Corporation, San Diego, CA).

[0277] In other embodiments of the invention, Cas and/or transposase are expressed in insect cells using, for example, baculovirus expression vectors. Baculovirus vectors available for expression of proteins in cultured insect cells (e.g., Sf 9 cells) include, but are not limited to, the pAc series (Smith et al. (1983) Mol. Cell Biol. 3:2156-2165) and the pVL series (Lucklow and Summers (1989) Virology 170:31-39).

[0278] In one example embodiment of the aspects described herein, Cas and/or transposition protein are expressed in mammalian cells using a mammalian expression vector. Non-limiting examples of mammalian expression vectors include pCDM8 (Seed, B. (1987) Nature 329:840) and pMT2PC (Kaufman et al. (1987) EMBO J. 6:187-195). When used in mammalian cells, the expression vector's control functions are often provided by viral regulatory elements. For example, commonly used promoters are derived from polyoma, Adenovirus 2, cytomegalovirus and Simian Virus 40. With regards to viral regulatory elements, mention is made of U.S. patent application Ser. No. 13/248,967, the contents of which are incorporated by reference herein in their entirety.

[0279] In some such embodiments, the mammalian expression vector is capable of directing expression of the nucleic acid encoding the Cas and/or transposition protein in a particular cell type (e.g., tissue-specific regulatory elements are used to express the nucleic acid). Tissue-specific regulatory elements are known in the art and in this regard, mention is made of U.S. Pat. No. 7,776,321, the contents of which are incorporated by reference herein in their entirety.

[0280] The vectors which may comprise nucleic acid sequences encoding the Cas and/or transposition protein described herein may be “introduced” into cells as polynucleotides, preferably DNA, by techniques well known in the art for introducing DNA and RNA into cells. The term “transduction” refers to any method whereby a nucleic acid sequence is introduced into a cell, e.g., by transfection, lipofection, electroporation (methods whereby an instrument is used to create micro-sized holes transiently in the plasma membrane of cells under an electric discharge, see, e.g., Banerjee et al., Med. Chem. 42:4292-99 (1999); Godbey et al., Gene Ther. 6:1380-88 (1999); Kichler et al., Gene Ther. 5:855-60 (1998); Birchaa et al., J. Pharm. 183:195-207 (1999)), biolistics, passive uptake, lipid:nucleic acid complexes, viral vector transduction, injection, contacting with naked DNA, gene gun (whereby the nucleic acid is coupled to a nanoparticle of an inert solid (commonly gold) which is then “shot” directly into the target cell's nucleus), calcium phosphate, DEAF dextran, lipofectin, lipofectamine, DIMRIE C, Superfect, and Effectin (Qiagen), unifectin, maxifectin, DOTMA, DOGS (Transfectam; dioctadecylamidoglycylspermine), DOPE (1,2-dioleoyl-sn-gly cero-3-phosphoethanolamine), DOTAP (1,2-dioleoyl-3-trimethylammonium propane), DDAB (dimethyl dioctadecylammonium bromide), DHDEAB (N,N-di-n-hexadecyl-N,N-dihydroxyethyl ammonium bromide), HDEAB (N-n-hexadecyl-N,N-dihydroxyethylammonium bromide), polybrene, poly(ethylenimine) (PEI), sonoporation (transfection via the application of sonic forces to cells), optical transfection (methods whereby a tiny (˜1 μm diameter) hole is transiently generated in the plasma membrane of a cell using a highly focused laser), magnetofection (refers to a transfection method, that uses magnetic force to deliver exogenous nucleic acids coupled to magnetic nanoparticles into target cells), impalefection (carried out by impaling cells by elongated nanostructures, such as carbon nanofibers or silicon nanowires which were coupled to exogenous nucleic acids), and the like. In this regard, mention is made of U.S. patent application Ser. No. 13/088,009, the contents of which are incorporated by reference herein in their entirety.

[0281] The nucleic acid sequences encoding the Cas and/or transposition protein or the vectors which may comprise the nucleic acid sequences encoding the Cas and/or transposition protein described herein may be introduced into a cell using any method known to one of skill in the art. The term “transformation” as used herein refers to the introduction of genetic material (e.g., a vector which may comprise a nucleic acid sequence encoding a Cas and/or transposition protein) into a cell, tissue or organism. Transformation of a cell may be stable or transient. The term “transient transformation” or “transiently transformed” refers to the introduction of one or more transgenes into a cell in the absence of integration of the transgene into the host cell's genome. Transient transformation may be detected by, for example, enzyme-linked immunosorbent assay (ELISA), which detects the presence of a polypeptide encoded by one or more of the transgenes. For example, a nucleic acid sequence encoding Cas and/or transposition protein may further comprise a constitutive promoter operably linked to a second output product, such as a reporter protein. Expression of that reporter protein indicates that a cell has been transformed or transfected with the nucleic acid sequence encoding Cas and/or transposition protein. Alternatively, or in combination, transient transformation may be detected by detecting the activity of the Cas and/or transposition protein. The term “transient transformant” refers to a cell which has transiently incorporated one or more transgenes.

[0282] In contrast, the term “stable transformation” or “stably transformed” refers to the introduction and integration of one or more transgenes into the genome of a cell or cellular system, preferably resulting in chromosomal integration and stable heritability through meiosis. Stable transformation of a cell may be detected by Southern blot hybridization of genomic DNA of the cell with nucleic acid sequences, which are capable of binding to one or more of the transgenes. Alternatively, stable transformation of a cell may also be detected by the polymerase chain reaction of genomic DNA of the cell to amplify transgene sequences. The term “stable transformant” refers to a cell, which has stably integrated one or more transgenes into the genomic DNA. Thus, a stable transformant is distinguished from a transient transformant in that, whereas genomic DNA from the stable transformant contains one or more transgenes, genomic DNA from the transient transformant does not contain a transgene. Transformation also includes introduction of genetic material into plant cells in the form of plant viral vectors involving epichromosomal replication and gene expression, which may exhibit variable properties with respect to meiotic stability. Transformed cells, tissues, or plants are understood to encompass not only the end product of a transformation process, but also transgenic progeny thereof.

[0283] For stable transfection of mammalian cells, it is known that, depending upon the expression vector and transfection technique used, only a small fraction of cells may integrate the foreign DNA into their genome. In order to identify and select these integrants, a gene that encodes a selectable biomarker (e.g., resistance to antibiotics) is generally introduced into the host cells along with the gene of interest. Selectable markers include those which confer resistance to drugs, such as G418, hygromycin and methotrexate. Nucleic acid encoding a selectable biomarker may be introduced into a host cell on the same vector as that encoding Cas and/or transposition protein or may be introduced on a separate vector. Cells stably transfected with the introduced nucleic acid may be identified by drug selection (e.g., cells that have incorporated the selectable biomarker gene survive, while the other cells die). With regard to transformation, mention is made to U.S. Pat. No. 6,620,986, the contents of which are incorporated by reference herein in their entirety.

### Regulatory Sequences and Promoters

[0284] As used herein, the term “regulatory sequence” is intended to include promoters, enhancers and other expression control elements (e.g., 5′ and 3′ untranslated regions (UTRs) and polyadenylation signals). With regard to regulatory sequences, mention is made of U.S. patent application Ser. No. 10/491,026, the contents of which are incorporated by reference herein in their entirety.

[0285] The terms “promoter”, “promoter element” or “promoter sequence” are equivalents and as used herein refer to a DNA sequence which, when operatively linked to a nucleotide sequence of interest, is capable of controlling the transcription of the nucleotide sequence of interest into mRNA. Promoters may be constitutive, inducible or regulatable. The term “tissue-specific” as it applies to a promoter refers to a promoter that is capable of directing selective expression of a nucleotide sequence of interest to a specific type of tissue in the relative absence of expression of the same nucleotide sequence of interest in a different type of tissue. Tissue specificity of a promoter may be evaluated by methods known in the art. The term “cell-type specific” as applied to a promoter refers to a promoter, which is capable of directing selective expression of a nucleotide sequence of interest in a specific type of cell in the relative absence of expression of the same nucleotide sequence of interest in a different type of cell within the same tissue. The term “cell-type specific” when applied to a promoter also means a promoter capable of promoting selective expression of a nucleotide sequence of interest in a region within a single tissue. Cell-type specificity of a promoter may be assessed using methods well known in the art., e.g., GUS activity staining or immunohistochemical staining. The term “minimal promoter” as used herein refers to the minimal nucleic acid sequence which may comprise a promoter element while also maintaining a functional promoter. A minimal promoter may comprise an inducible, constitutive or tissue-specific promoter. With regards to promoters, mention is made of PCT publication WO 2011/028929 and U.S. application Ser. No. 12/511,940, the contents of which are incorporated by reference herein in their entirety.

[0286] In some cases, the promoter may be suitable for polynucleotide encoding RNA molecules with poly-U stretches. Such promoter may reduce the early termination caused by the poly-U stretches in RNA.

[0287] In some cases, the promoter may be a constitutive promoter, e.g., U6 and H1 promoters, retroviral Rous sarcoma virus (RSV) LTR promoter, cytomegalovirus (CMV) promoter, SV40 promoter, dihydrofolate reductase promoter, β-actin promoter, phosphoglycerol kinase (PGK) promoter, ubiquitin C, U5 snRNA, U7 snRNA, tRNA promoters or EFlα promoter. In certain cases, the promoter may be a tissue-specific promoter and may direct expression primarily in a desired tissue of interest, such as muscle, neuron, bone, skin, blood, specific organs (e.g. liver, pancreas), or particular cell types (e.g. lymphocytes). Examples of tissue-specific promoters include Ick, myogenin, or thy 1 promoters. In one example embodiment, the promoter may direct expression in a temporal-dependent manner, such as in a cell-cycle dependent or developmental stage-dependent manner, which may or may not also be tissue or cell-type specific. In certain cases, the promoter may be an inducible promoter, e.g., can be activated by a chemical such as doxycycline.

[0288] In some cases, the promoters may be cell-specific, tissue-specific, or organ-specific promoters. Example of cell-specific, tissue-specific, or organ-specific promoters include promoter for creatine kinase, (for expression in muscle and cardiac tissue), immunoglobulin heavy or light chain promoters (for expression in B cells), and smooth muscle alpha-actin promoter. Exemplary tissue-specific promoters for the liver include HMG-COA reductase promoter, sterol regulatory element 1, phosphoenol pyruvate carboxy kinase (PEPCK) promoter, human C-reactive protein (CRP) promoter, human glucokinase promoter, cholesterol 7-alpha hydroylase (CYP-7) promoter, beta-galactosidase alpha-2,6 sialyltransferase promoter, insulin-like growth factor binding protein (IGFBP-1) promoter, aldolase B promoter, human transferrin promoter, and collagen type I promoter. Exemplary tissue-specific promoters for the prostate include the prostatic acid phosphatase (PAP) promoter, prostatic secretory protein of 94 (PSP 94) promoter, prostate specific antigen complex promoter, and human glandular kallikrein gene promoter (hgt-1). Exemplary tissue-specific promoters for gastric tissue include H+/K+-ATPase alpha subunit promoter. Exemplary tissue-specific expression elements for the pancreas include pancreatitis associated protein promoter (PAP), elastase 1 transcriptional enhancer, pancreas specific amylase and elastase enhancer promoter, and pancreatic cholesterol esterase gene promoter. Exemplary tissue-specific promoters for the endometrium include, the uteroglobin promoter. Exemplary tissue-specific promoters for adrenal cells include cholesterol side-chain cleavage (SCC) promoter. Exemplary tissue-specific promoters for the general nervous system include gamma-gamma enolase (neuron-specific enolase, NSE) promoter. Exemplary tissue-specific promoters for the brain include the neurofilament heavy chain (NF—H) promoter. Exemplary tissue-specific promoters for lymphocytes include the human CGL-1/granzyme B promoter, the terminal deoxy transferase (TdT), lambda 5, VpreB, and 1 ck (lymphocyte specific tyrosine protein kinase p561ck) promoter, the humans CD2 promoter and its 3′transcriptional enhancer, and the human NK and T cell specific activation (NKGS) promoter. Exemplary tissue-specific promoters for the colon include pp60c-src tyrosine kinase promoter, organ-specific neoantigens (OSNs) promoter, and colon specific antigen-P promoter. Exemplary tissue-specific promoters for breast cells include the human alpha-lactalbumin promoter. Exemplary tissue-specific promoters for the lung include the cystic fibrosis transmembrane conductance regulator (CFTR) gene promoter.

[0289] Examples of cell-specific, tissue-specific, or organ-specific promoters may also include those used for expressing the barcode or other transcripts within a particular plant tissue (See e.g., WO2001098480A2, “Promoters for regulation of plant gene expression”). Examples of such promoters include the lectin (Vodkin, Prog. Clinc. Biol. Res., 138:87-98 (1983); and Lindstrom et al., Dev. Genet., 11:160-167 (1990)), corn alcohol dehydrogenase 1 (Dennis et al., Nucleic Acids Res., 12:3983-4000 (1984)), corn light harvesting complex (Becker, Plant Mol Biol., 20(1): 49-60 (1992); and Bansal et al., Proc. Natl. Acad. Sci. U.S.A., 89:3654-3658 (1992)), corn heat shock protein (Odell et al., Nature (1985) 313:810-812; and Marrs et al., Dev. Genet.,14(1):27-41 (1993)), small subunit RuBP carboxylase (Waksman et al., Nucleic Acids Res., 15(17):7181 (1987); and Berry-Lowe et al., J. Mol. Appl. Genet., 1(6):483-498 (1982)), Ti plasmid mannopine synthase (Ni et al., Plant Mol. Biol., 30(1):77-96 (1996)), Ti plasmid nopaline synthase (Bevan, Nucleic Acids Res., 11(2):369-385 (1983)), petunia chalcone isomerase (Van Tunen et al., EMBO J., 7:1257-1263 (1988)), bean glycine rich protein 1 (Keller et al., Genes Dev., 3:1639-1646 (1989)), truncated CaMV 35s (Odell et al., Nature (1985) 313:810-812), potato patatin (Wenzler et al., Plant Mol. Biol., 13:347-354 (1989)), root cell (Yamamoto et al., Nucleic Acids Res., 18:7449 (1990)), maize zein (Reina et al., Nucleic Acids Res., 18:6425 (1990); Kriz et al., Mol. Gen. Genet., 207:90-98 1987; Wandelt and Feix, Nucleic Acids Res., 17:2354 (1989); Langridge and Feix, Cell, 34:1015-1022 (1983); and Reina et al., Nucleic Acids Res., 18:7449 (1990)), globulin-1 (Belanger et al., Genetics, 129:863-872 (1991)), α-tubulin, cab (Sullivan et al., Mol. Gen. Genet.,215:431-440 (1989)), PEPCase (Cushman et al., Plant Cell, 1(7):715-25 (1989)), R gene complex-associated promoters (Chandler et al., Plant Cell, 1: 1175-1183 (1989)), and chalcone synthase promoters (Franken et al., EMBO J., 10:2605-2612, 1991)). Examples of tissue-specific promoters also include those described in the following references: Yamamoto et al., Plant J (1997) 12(2):255-265; Kawamata et al., Plant Cell Physiol. (1997) 38(7):792-803; Hansen et al., Mol. Gen Genet. (1997) 254(3):337); Russell et al., Transgenic Res. (1997) 6(2):157-168; Rinehart et al., Plant Physiol. (1996) 112(3):1331; Van Camp et al., Plant Physiol. (1996) 112(2):525-535; Canevascini et al., Plant Physiol. (1996) 112(2):513-524; Yamamoto et al., Plant Cell Pkysiol. (1994) 35(5):773-778; Lam, Results Probl. Cell Differ. (1994) 20:181-196; Orozco et al., Plant Mol. Biol. (1993) 23(6):1129-1138; Matsuoka et al., Proc Natl. Acad. Sci. USA (1993) 90(20):9586-9590; and Guevara-Garcia et al., Plant J. (1993) 4(3):495-505; maize phosphoenol carboxylase (PEPC) has been described by Hudspeth & Grula (Plant Molec Biol 12: 579-589 (1989)); leaf-specific promoters such as those described in Yamamoto et al., Plant J. (1997) 12(2):255-265; Kwon et al., Plant Physiol. (1994) 105:357-367; Yamamoto et al., Plant Cell Physiol. (1994) 35(5):773-778; Gotor et al., Plant J. (1993) 3:509-518; Orozco et al., Plant Mol. Biol. (1993) 23(6):1129-1138; and Matsuoka et al., Proc. Natl. Acad. Sci. USA (1993) 90(20):9586-9590.

### Nuclear Localization Signals

[0290] In one example embodiment, the systems and compositions herein further comprise one or more nuclear localization signals (NLSs) capable of driving the accumulation of the components, e.g., Cas and/or transposition protein(s) to a desired amount in the nucleus of a cell.

[0291] In certain embodiments, at least one nuclear localization signal (NLS) is attached to the Cas and/or transposition protein(s), or polynucleotides encoding the proteins. In one example embodiment, one or more C-terminal or N-terminal NLSs are attached (and hence nucleic acid molecule(s) coding for the Cas and/or transposition protein(s)can include coding for NLS(s) so that the expressed product has the NLS(s) attached or connected). In an embodiment a C-terminal NLS is attached for expression and nuclear targeting in eukaryotic cells, e.g., human cells.

[0292] Non-limiting examples of NLSs include an NLS sequence derived from: the NLS of the SV40 virus large T-antigen, having the amino acid sequence PKKKRKV (SEQ ID NO: 484); the NLS from nucleoplasmin (e.g., the nucleoplasmin bipartite NLS with the sequence KRPAATKKAGQAKKK (SEQ ID NO: 485)); the c-myc NLS having the amino acid sequence PAAKRVKLD (SEQ ID NO: 486)or RQRRNELKRS (SEQ ID NO: 487); the hRNPA1 M9 NLS having the sequence NQSSNFGPMKGGNFGGRSSGPYGGGGQYFAKPRNQGGY (SEQ ID NO: 488); the sequence RMRIZFKNKGKDTAELRRRRVEVSVELRKAKKDEQILKRRNV (SEQ ID NO: 489) of the IBB domain from importin-alpha; the sequences VSRKRPRP (SEQ ID NO: 490) and PPKKARED (SEQ ID NO: 491) of the myoma T protein; the sequence PQPKKKPL (SEQ ID NO: 492) of human p53; the sequence SALIKKKKKMAP (SEQ ID NO: 493) of mouse c-abl IV; the sequences DRLRR (SEQ ID NO: 494) and PKQKKRK (SEQ ID NO: 495) of the influenza virus NS1; the sequence RKLKKKIKKL (SEQ ID NO: 496) of the Hepatitis virus delta antigen; the sequence REKKKFLKRR (SEQ ID NO: 497) of the mouse Mx1 protein; the sequence KRKGDEVDGVDEVAKKKSKK (SEQ ID NO: 498) of the human poly(ADP-ribose) polymerase; and the sequence RKCLQAGMNLEARKTKK (SEQ ID NO: 499) of the steroid hormone receptors (human) glucocorticoid.

[0293] In one example embodiment, a NLS is a heterologous NLS. For example, the NLS is not naturally present in the molecule (e.g., Cas and/or transposition protein(s)) it attached to.

[0294] In general, strength of nuclear localization activity may derive from the number of NLSs in the nucleic acid-targeting effector protein, the particular NLS(s) used, or a combination of these factors. Detection of accumulation in the nucleus may be performed by any suitable technique. For example, a detectable marker may be to the nucleic acid-targeting protein, such that location within a cell may be visualized, such as in combination with a means for detecting the location of the nucleus (e.g., a stain specific for the nucleus such as DAPI).

[0295] In one example embodiment, a vector described herein (e.g., those comprising polynucleotides encoding Cas and/or transposition protein(s)) comprise one or more nuclear localization sequences (NLSs), such as about or more than about 1, 2, 3, 4, 5, 6, 7, 8, 9, 10, or more NLSs. More particularly, vector comprises one or more NLSs not naturally present in the Cas and/or transposition protein(s). Most particularly, the NLS is present in the vector 5′ and/or 3′ of the Cas and/or transposition protein(s) sequence. In one example embodiment, the Cas and/or transposition protein(s) comprises about or more than about 1, 2, 3, 4, 5, 6, 7, 8, 9, 10, or more NLSs at or near the amino-terminus, about or more than about 1, 2, 3, 4, 5, 6, 7, 8, 9, 10, or more NLSs at or near the carboxy-terminus, or a combination of these (e.g., zero or at least one or more NLS at the amino-terminus and zero or at one or more NLS at the carboxy terminus). When more than one NLS is present, each may be selected independently of the others, such that a single NLS may be present in more than one copy and/or in combination with one or more other NLSs present in one or more copies. In one example embodiment, an NLS is considered near the N- or C-terminus when the nearest amino acid of the NLS is within about 1, 2, 3, 4, 5, 10, 15, 20, 25, 30, 40, 50, or more amino acids along the polypeptide chain from the N- or C-terminus.

[0296] In certain embodiments, other localization tags may be to the Cas and/or transposition protein(s), such as without limitation for localizing to particular sites in a cell, such as to organelles, such as mitochondria, plastids, chloroplasts, vesicles, golgi, (nuclear or cellular) membranes, ribosomes, nucleolus, ER, cytoskeletons, vacuoles, centrosomes, nucleosome, granules, centrioles, etc. In one example embodiment, one or more NLS are attached to the Cas protein, a TnsB proteins, a TnsC protein, a TniQ protein, or a combination thereof.

### Donor Polynucleotides

[0297] The composition may further comprise one or more donor polynucleotides (e.g., for insertion into the target polynucleotide). A donor polynucleotide may comprise one or more transposable elements that can be inserted or integrated to a target site. The donor polynucleotide may be or comprise one or more components of a transposon. A donor polynucleotide may comprise a donor sequence to be inserted and one or more transposition protein recognition sequences, e.g., LE and RE as described herein. In some examples, an intervening sequence may be between a transposition protein recognition sequence (e.g., LE and RE) and a donor sequence on the donor polynucleotide. Alternatively or additionally, a transposition protein recognition sequences (e.g., LE and RE) may be immediately adjacent to the donor sequence.

[0298] The donor polynucleotide may include a transposon left end (LE) and transposon right end (RE). The LE and RE sequences may be endogenous sequences for the compositions used or may be heterologous sequences recognizable by the compositions used, or the LE or RE may be synthetic sequences that comprise a sequence or structure feature recognized by the compositions and sufficient to allow insertion of the donor polynucleotide into the target polynucleotides. In one example embodiment, the LE and RE sequences are truncated. Example Tn7 elements, including right end sequence element and left end sequence element include those described in Parks A R, Plasmid, 2009 Jan.; 61(1):1-14.

[0299] A donor polynucleotide may comprise a donor sequence for insertion into a target polynucleotide.

[0300] A donor polynucleotide may be any type of polynucleotides, including, but not limited to, a gene, a gene fragment, a non-coding polynucleotide, a regulatory polynucleotide, a synthetic polynucleotide, etc.

[0301] In one example embodiment, the donor polynucleotide may have characteristics that prevent cointegrate formulation. In some cases, a donor polynucleotide may be a linear DNA molecule. In certain examples, a donor polynucleotide may be a nicked DNA molecule, e.g., a 5′ nicked DNA molecule. May be a linear DNA molecule. In a particular example, the donor polynucleotide may be a circular DNA molecule comprising a donor sequence nicked at 5′ end. In some cases, such donor polynucleotides allow applying CAST compositions herein for homologous recombination-independent genome engineering.

[0302] The donor polynucleotide may be inserted at a position 3′ or 5′ of a PAM on a target polynucleotide. In one example embodiment, a donor polynucleotide comprises a PAM sequence.

[0303] The donor sequence may be inserted at a position between 10 bases and 200 bases, e.g., between 20 bases and 150 bases, between 30 bases and 100 bases, between 45 bases and 70 bases, between 45 bases and 60 bases, between 55 bases and 70 bases, between 49 bases and 56 bases or between 60 bases and 66 bases, from a PAM sequence on the target polynucleotide. In some cases, the insertion is at a position upstream of the PAM sequence. In some cases, the insertion is at a position downstream of the PAM sequence. In some cases, the insertion is at a position from 49 to 56 bases or base pairs downstream from a PAM sequence. In some cases, the insertion is at a position from 60 to 66 bases or base pairs downstream from a PAM sequence.

[0304] The donor polynucleotide may be used for editing the target polynucleotide. In some cases, the donor sequence comprises one or more mutations to be introduced into the target polynucleotide. Examples of such mutations include substitutions, deletions, insertions, or a combination thereof. The mutations may cause a shift in an open reading frame on the target polynucleotide. In some cases, the donor sequence alters a stop codon in the target polynucleotide. For example, the donor sequence may correct a premature stop codon. The correction may be achieved by deleting the stop codon or introduces one or more mutations to the stop codon. In other example embodiments, the donor sequence addresses loss of function mutations, deletions, or translocations that may occur, for example, in certain disease contexts by inserting or restoring a functional copy of a gene, or functional fragment thereof, or a functional regulatory sequence or functional fragment of a regulatory sequence. A functional fragment refers to less than the entire copy of a gene by providing sufficient nucleotide sequence to restore the functionality of a wild type gene or non-coding regulatory sequence (e.g. sequences encoding long non-coding RNA). In one example embodiment, the compositions disclosed herein may be used to replace a single allele of a defective gene or defective fragment thereof.

[0305] In another example embodiment, the compositions disclosed herein may be used to replace both alleles of a defective gene or defective gene fragment. A “defective gene” or “defective gene fragment” is a gene or portion of a gene that when expressed fails to generate a functioning protein or non-coding RNA with functionality of a corresponding wild-type gene. In one example embodiment, these defective genes may be associated with one or more disease phenotypes. In one example embodiment, the defective gene or gene fragment is not replaced but the compositions described herein are used to insert donor sequences that encode gene or gene fragments that compensate for or override defective gene expression such that cell phenotypes associated with defective gene expression are eliminated or changed to a different or desired cellular phenotype.

[0306] In other example embodiments, the compositions disclosed herein may be used to augment healthy cells that enhance cell function and/or are therapeutically beneficial. For example, the compositions disclosed herein may be used to introduce a chimeric antigen receptor (CAR) into a specific spot of a T cell genome—enabling the T cell to recognize and destroy cancer cells.

[0307] In certain embodiments of the invention, the donor may include, but not be limited to, genes or gene fragments, encoding proteins or RNA transcripts to be expressed, regulatory elements, repair templates, and the like. According to the invention, the donor polynucleotides may comprise left end and right end sequence elements that function with transposition components that mediate insertion.

[0308] In certain cases, the donor polynucleotide manipulates a splicing site on the target polynucleotide. In some examples, the donor sequence disrupts a splicing site. The disruption may be achieved by inserting the polynucleotide to a splicing site and/or introducing one or more mutations to the splicing site. In certain examples, the donor sequence may restore a splicing site. For example, the polynucleotide may comprise a splicing site sequence.

[0309] The donor sequence to be inserted may have a size from 10 bases to 50 kb in length, e.g., from 50 to 40 kb, from 100 to 30 kb, from 100 bases to 300 bases, from 200 bases to 400 bases, from 300 bases to 500 bases, from 400 bases to 600 bases, from 500 bases to 700 bases, from 600 bases to 800 bases, from 700 bases to 900 bases, from 800 bases to 1000 bases, from 900 bases to from 1100 bases, from 1000 bases to 1200 bases, from 1100 bases to 1300 bases, from 1200 bases to 1400 bases, from 1300 bases to 1500 bases, from 1400 bases to 1600 bases, from 1500 bases to 1700 bases, from 600 bases to 1800 bases, from 1700 bases to 1900 bases, from 1800 bases to 2000 bases, from 1900 bases to 2100 bases, from 2000 bases to 2200 bases, from 2100 bases to 2300 bases, from 2200 bases to 2400 bases, from 2300 bases to 2500 bases, from 2400 bases to 2600 bases, from 2500 bases to 2700 bases, from 2600 bases to 2800 bases, from 2700 bases to 2900 bases, or from 2800 bases to 3000 bases in length.

[0310] The components in the compositions herein may comprise one or more mutations that alter their (e.g., the transposition proteins) binding affinity to the donor polynucleotide. In some examples, the mutations increase the binding affinity between the transposition proteins and the donor polynucleotide. In certain examples, the mutations decrease the binding affinity between the transposition proteins and the donor polynucleotide. The mutations may alter the activity of the Cas and/or transposition proteins.

[0311] In certain embodiments, the compositions disclosed herein are capable of unidirectional insertion, that is the composition inserts the donor sequence in only one orientation.

### Methods of Inserting Donor Sequences

[0312] The present disclosure further provides methods of inserting a donor sequence into a target nucleic acid in a cell, which comprises introducing into a cell: (a) one or more transposition proteins (e.g., CRISPR-associated transposases) or functional fragments thereof, (b) one or more nucleotide-binding molecules. The one or more nucleotide-binding molecules may be sequence-specific.

[0313] In one example embodiment, the method comprises introducing into a cell or a population of cells, (a) one or more CRISPR-associated transposition proteins or functional fragments thereof, (b) a DNA-binding protein (e.g., dCas), (c) a guide molecule capable of binding to a target sequent on a target polynucleotide, and designed to form a CRISPR-Cas complex with the Cas protein, and (d) a donor polynucleotide comprising the donor sequence to be introduced.

[0314] The one or more of components (a)-(d) may be introduced into a cell by delivering a delivery polynucleotide comprising nucleic acid sequence encoding the one or more components. The nucleic acid sequence encoding the one or more components may be expressed from a nucleic acid operably linked to a regulatory sequence that is expressed in the cell. The one or more components may be encoded on the same delivery polynucleotide, on individual delivery polynucleotides, or some combination thereof. The delivery polynucleotide may be a vector. Example vectors and delivery compositions are discussed in further detail below.

[0315] Alternatively, the components (a)-(d) may be delivered to a cell or population of cells as a pre-formed ribonucleoprotein (RNP) complex. In one example embodiment, components (a)-(c) are delivered s an RNP and component (d) is delivered as a polynucleotide. Suitable example compositions for delivery of RNPs are discussed in further detail below.

[0316] In one example embodiment, the CAST system described above is delivered to prokaryotic cell. In one example embodiment, the cell is a eukaryotic cell. The eukaryotic cell may be a mammalian cell, a cell of a non-human primate, or a human cell. In one example embodiment, the cell may be a plant cell.

[0317] In one example embodiment, the CAST system may be delivered to a cell or population of cells in vitro.

[0318] In one example embodiment, the CAST system may be delivered in vivo.

[0319] The insertion may occur at a position from a Cas binding site on a nucleic acid molecule. In some examples, the insertion may occur at a position on the 3′ side from a Cas binding site, e.g., at least 1 bp, at least 5 bp, at least 10 bp, at least 15 bp, at least 20 bp, at least 35 bp, at least 40 bp, at least 45 bp, at least 50 bp, at least 55 bp, at least 60 bp, at least 65 bp, at least 70 bp, at least 75 bp, at least 80 bp, at least 85 bp, at least 90 bp, at least 95 bp, or at least 100 bp on the 3′ side from a Cas binding site. In some examples, the insertion may occur at a position on the 5′ side from a Cas binding site, e.g., at least 1 bp, at least 5 bp, at least 10 bp, at least 15 bp, at least 20 bp, at least 35 bp, at least 40 bp, at least 45 bp, at least 50 bp, at least 55 bp, at least 60 bp, at least 65 bp, at least 70 bp, at least 75 bp, at least 80 bp, at least 85 bp, at least 90 bp, at least 95 bp, or at least 100 bp on the 5′ side from a Cas binding site. In a particular example, the insertion may occur 65 bp on the 3′ side from the Cas binding site.

[0320] In some cases, the donor sequence is inserted to the target polynucleotide via a cointegrate mechanism. For example, the donor sequence and the target polynucleotide may be nicked and. A duplicate of the donor sequence and the target polynucleotide may be generated by a polymerase. In certain cases, the donor sequence is inserted in the target polynucleotide via a cut and paste mechanism. For example, the donor sequence may be comprised in a nucleic acid molecule and may be cut out and inserted to another position in the nucleic acid molecule.

### Delivery

[0321] The present disclosure also provides delivery systems for introducing components of the systems and compositions herein to cells, tissues, organs, or organisms. A delivery system may comprise one or more delivery vehicles and/or cargos. Exemplary delivery systems and methods include those described in paragraphs to of Feng Zhang et al., (WO2016106236A1), and pages 1241-1251 and Table 1 of Lino C A et al., Delivering CRISPR: a review of the challenges and approaches, DRUG DELIVERY, 2018, VOL. 25, NO. 1, 1234-1257, which are incorporated by reference herein in their entireties.

[0322] In one example embodiment, the delivery systems may be used to introduce the components of the systems and compositions to plant cells. For example, the components may be delivered to plant using electroporation, microinjection, aerosol beam injection of plant cell protoplasts, biolistic methods, DNA particle bombardment, and/or Agrobacterium-mediated transformation. Examples of methods and delivery systems for plants include those described in Fu et al., Transgenic Res. 2000 February;9(1):11-9; Klein R M, et al., Biotechnology. 1992; 24:384-6; Casas A M et al., Proc Natl Acad Sci USA. 1993 Dec. 1; 90(23): 11212-11216; and U.S. Pat. No. 5,563,055, Davey M R et al., Plant Mol Biol. 1989 September;13(3):273-85, which are incorporated by reference herein in their entireties.

### Cargos

[0323] The delivery systems may comprise one or more cargos. The cargos may comprise one or more components of the systems and compositions herein. A cargo may comprise one or more of the following: i) a plasmid encoding one or more Cas proteins; ii) a plasmid encoding one or more guide RNAs, iii) mRNA of one or more Cas proteins; iv) one or more guide RNAs; v) one or more Cas proteins; vi) any combination thereof. In some examples, a cargo may comprise a plasmid encoding one or more Cas protein and one or more (e.g., a plurality of) guide RNAs. In one example embodiment, a cargo may comprise mRNA encoding one or more Cas proteins and one or more guide RNAs.

[0324] In some examples, a cargo may comprise one or more Cas proteins and one or more guide RNAs, e.g., in the form of ribonucleoprotein complexes (RNP). The ribonucleoprotein complexes may be delivered by methods and systems herein. In some cases, the ribonucleoprotein may be delivered by way of a polypeptide-based shuttle agent. In one example, the ribonucleoprotein may be delivered using synthetic peptides comprising an endosome leakage domain (ELD) operably linked to a cell penetrating domain (CPD), to a histidine-rich domain and a CPD, e.g., as describe in WO2016161516. RNP may also be used for delivering the compositions and systems to plant cells, e.g., as described in Wu J W, et al., Nat Biotechnol. 2015 November; 33(11):1162-4.

### Physical Delivery

[0325] In one example embodiment, the cargos may be introduced to cells by physical delivery methods. Examples of physical methods include microinjection, electroporation, and hydrodynamic delivery. Both nucleic acid and proteins may be delivered using such methods. For example, Cas protein may be prepared in vitro, isolated, (refolded, purified if needed), and introduced to cells.

### Microinjection

[0326] Microinjection of the cargo directly to cells can achieve high efficiency, e.g., above 90% or about 100%. In one example embodiment, microinjection may be performed using a microscope and a needle (e.g., with 0.5-5.0 μm in diameter) to pierce a cell membrane and deliver the cargo directly to a target site within the cell. Microinjection may be used for in vitro and ex vivo delivery.

[0327] Plasmids comprising coding sequences for Cas proteins and/or guide RNAs, mRNAs, and/or guide RNAs, may be microinjected. In some cases, microinjection may be used i) to deliver DNA directly to a cell nucleus, and/or ii) to deliver mRNA (e.g., in vitro transcribed) to a cell nucleus or cytoplasm. In certain examples, microinjection may be used to delivery sgRNA directly to the nucleus and Cas-encoding mRNA to the cytoplasm, e.g., facilitating translation and shuttling of Cas to the nucleus.

[0328] Microinjection may be used to generate genetically modified animals. For example, gene editing cargos may be injected into zygotes to allow for efficient germline modification. Such approach can yield normal embryos and full-term mouse pups harboring the desired modification(s). Microinjection can also be used to provide transiently up- or down-regulate a specific gene within the genome of a cell, e.g., using CRISPRa and CRISPRi.

### Electroporation

[0329] In one example embodiment, the cargos and/or delivery vehicles may be delivered by electroporation. Electroporation may use pulsed high-voltage electrical currents to transiently open nanometer-sized pores within the cellular membrane of cells suspended in buffer, allowing for components with hydrodynamic diameters of tens of nanometers to flow into the cell. In some cases, electroporation may be used on various cell types and efficiently transfer cargo into cells. Electroporation may be used for in vitro and ex vivo delivery.

[0330] Electroporation may also be used to deliver the cargo to into the nuclei of mammalian cells by applying specific voltage and reagents, e.g., by nucleofection. Such approaches include those described in Wu Y, et al. (2015). Cell Res 25:67-79; Ye L, et al. (2014). Proc Natl Acad Sci USA 111:9591-6; Choi P S, Meyerson M. (2014). Nat Commun 5:3728; Wang J, Quake S R. (2014). Proc Natl Acad Sci 111:13157-62. Electroporation may also be used to deliver the cargo in vivo, e.g., with methods described in Zuckermann M, et al. (2015). Nat Commun 6:7391.

### Hydrodynamic Delivery

[0331] Hydrodynamic delivery may also be used for delivering the cargos, e.g., for in vivo delivery. In some examples, hydrodynamic delivery may be performed by rapidly pushing a large volume (8-10% body weight) solution containing the gene editing cargo into the bloodstream of a subject (e.g., an animal or human), e.g., for mice, via the tail vein. As blood is incompressible, the large bolus of liquid may result in an increase in hydrodynamic pressure that temporarily enhances permeability into endothelial and parenchymal cells, allowing for cargo not normally capable of crossing a cellular membrane to pass into cells. This approach may be used for delivering naked DNA plasmids and proteins. The delivered cargos may be enriched in liver, kidney, lung, muscle, and/or heart.

### Transfection

[0332] The cargos, e.g., nucleic acids, may be introduced to cells by transfection methods for introducing nucleic acids into cells. Examples of transfection methods include calcium phosphate-mediated transfection, cationic transfection, liposome transfection, dendrimer transfection, heat shock transfection, magnetofection, lipofection, impalefection, optical transfection, proprietary agent-enhanced uptake of nucleic acid.

### Delivery Vehicles

[0333] The delivery systems may comprise one or more delivery vehicles. The delivery vehicles may deliver the cargo into cells, tissues, organs, or organisms (e.g., animals or plants). The cargos may be packaged, carried, or otherwise associated with the delivery vehicles. The delivery vehicles may be selected based on the types of cargo to be delivered, and/or the delivery is in vitro and/or in vivo. Examples of delivery vehicles include vectors, viruses, non-viral vehicles, and other delivery reagents described herein.

[0334] The delivery vehicles in accordance with the present invention may a greatest dimension (e.g. diameter) of less than 100 microns (μm). In one example embodiment, the delivery vehicles have a greatest dimension of less than 10 μm. In one example embodiment, the delivery vehicles may have a greatest dimension of less than 2000 nanometers (nm). In one example embodiment, the delivery vehicles may have a greatest dimension of less than 1000 nanometers (nm). In one example embodiment, the delivery vehicles may have a greatest dimension (e.g., diameter) of less than 900 nm, less than 800 nm, less than 700 nm, less than 600 nm, less than 500 nm, less than 400 nm, less than 300 nm, less than 200 nm, less than 150 nm, or less than 100 nm, less than 50 nm. In one example embodiment, the delivery vehicles may have a greatest dimension ranging between 25 nm and 200 nm.

[0335] In one example embodiment, the delivery vehicles may be or comprise particles. For example, the delivery vehicle may be or comprise nanoparticles (e.g., particles with a greatest dimension (e.g., diameter) no greater than 1000 nm. The particles may be provided in different forms, e.g., as solid particles (e.g., metal such as silver, gold, iron, titanium), non-metal, lipid-based solids, polymers), suspensions of particles, or combinations thereof. Metal, dielectric, and semiconductor particles may be prepared, as well as hybrid structures (e.g., core-shell particles). Nanoparticles may also be used to deliver the compositions and systems to plant cells, e.g., as described in WO 2008042156, US 20130185823, and WO2015089419.

### Vectors

[0336] The systems, compositions, and/or delivery systems may comprise one or more vectors. The present disclosure also include vector systems. A vector system may comprise one or more vectors. In one example embodiment, a vector refers to a nucleic acid molecule capable of transporting another nucleic acid to which it has been linked. Vectors include nucleic acid molecules that are single-stranded, double-stranded, or partially double-stranded; nucleic acid molecules that comprise one or more free ends, no free ends (e.g., circular); nucleic acid molecules that comprise DNA, RNA, or both; and other varieties of polynucleotides known in the art. A vector may be a plasmid, e.g., a circular double stranded DNA loop into which additional DNA segments can be inserted, such as by standard molecular cloning techniques. Certain vectors may be capable of autonomous replication in a host cell into which they are introduced (e.g., bacterial vectors having a bacterial origin of replication and episomal mammalian vectors). Some vectors (e.g., non-episomal mammalian vectors) are integrated into the genome of a host cell upon introduction into the host cell, and thereby are replicated along with the host genome. In certain examples, vectors may be expression vectors, e.g., capable of directing the expression of genes to which they are operatively-linked. In some cases, the expression vectors may be for expression in eukaryotic cells. Common expression vectors of utility in recombinant DNA techniques are often in the form of plasmids.

[0337] Examples of vectors include pGEX, pMAL, pRIT5, E. coli expression vectors (e.g., pTrc, pET 11d, yeast expression vectors (e.g., pYepSecl, pMFa, pJRY88, pYES2, and picZ, Baculovirus vectors (e.g., for expression in insect cells such as SF9 cells) (e.g., pAc series and the pVL series), mammalian expression vectors (e.g., pCDM8 and pMT2PC.

[0338] A vector may comprise i) Cas encoding sequence(s), and/or ii) a single, or at least 2, at least 3, at least 4, at least 5, at least 6, at least 7, at least 8, at least 9, at least 10, at least 12, at least 14, at least 16, at least 32, at least 48, at least 50 guide RNA(s) encoding sequences. In a single vector there can be a promoter for each RNA coding sequence. Alternatively or additionally, in a single vector, there may be a promoter controlling (e.g., driving transcription and/or expression) multiple RNA encoding sequences.

[0339] In one example embodiment, the components (or coding sequences thereof) in a composition or system herein may be comprised in a single vector. For example, a single vector may comprise coding sequences for one or more CRISPR-associated Tn7 transposition proteins, one or more Cas proteins, and one more guide molecules. In certain embodiments, the components (or coding sequences thereof) in a composition or system herein may be comprised in separate vectors. In some examples, a first vector may comprise coding sequences for one or more CRISPR-associated Tn7 transposition proteins; a second vector may comprise coding sequences for one or more Cas proteins; a third vector may comprise coding sequences for one or more guide molecules. In some examples, a first vector may comprise coding sequences for one or more CRISPR-associated Tn7 transposition proteins and one or more Cas proteins; a second vector may comprise coding sequences for one or more guide molecules. In some examples, a first vector may comprise coding sequences for one or more CRISPR-associated Tn7 transposition proteins; a second vector may comprise coding sequences for one or more Cas proteins and one or more guide molecules. In some examples, a first vector may comprise coding sequences for one or more CRISPR-associated Tn7 transposition proteins and one or more guide molecules; a second vector may comprise coding sequences for one or more Cas proteins.

### Regulatory Elements

[0340] A vector may comprise one or more regulatory elements. The regulatory element(s) may be operably linked to coding sequences of Cas proteins, accessary proteins, guide RNAs (e.g., a single guide RNA, crRNA, and/or tracrRNA), or combination thereof. The term “operably linked” is intended to mean that the nucleotide sequence of interest is linked to the regulatory element(s) in a manner that allows for expression of the nucleotide sequence (e.g. in an in vitro transcription/translation system or in a host cell when the vector is introduced into the host cell). In certain examples, a vector may comprise: a first regulatory element operably linked to a nucleotide sequence encoding a Cas protein, and a second regulatory element operably linked to a nucleotide sequence encoding a guide RNA.

[0341] Examples of regulatory elements include promoters, enhancers, internal ribosomal entry sites (IRES), and other expression control elements (e.g., transcription termination signals, such as polyadenylation signals and poly-U sequences). Such regulatory elements are described, for example, in Goeddel, GENE EXPRESSION TECHNOLOGY: METHODS IN ENZYMOLOGY 185, Academic Press, San Diego, Calif. (1990). Regulatory elements include those that direct constitutive expression of a nucleotide sequence in many types of host cell and those that direct expression of the nucleotide sequence only in certain host cells (e.g., tissue-specific regulatory sequences). A tissue-specific promoter may direct expression primarily in a desired tissue of interest, such as muscle, neuron, bone, skin, blood, specific organs (e.g., liver, pancreas), or particular cell types (e.g., lymphocytes). Regulatory elements may also direct expression in a temporal-dependent manner, such as in a cell-cycle dependent or developmental stage-dependent manner, which may or may not also be tissue or cell-type specific.

[0342] Examples of promoters include one or more pol III promoter (e.g., 1, 2, 3, 4, 5, or more pol III promoters), one or more pol II promoters (e.g., 1, 2, 3, 4, 5, or more pol II promoters), one or more pol I promoters (e.g., 1, 2, 3, 4, 5, or more pol I promoters), or combinations thereof. Examples of pol III promoters include, but are not limited to, U6 and H1 promoters. Examples of pol II promoters include, but are not limited to, the retroviral Rous sarcoma virus (RSV) LTR promoter (optionally with the RSV enhancer), the cytomegalovirus (CMV) promoter (optionally with the CMV enhancer), the SV40 promoter, the dihydrofolate reductase promoter, the β-actin promoter, the phosphoglycerol kinase (PGK) promoter, and the EFlα promoter.

### Viral Vectors

[0343] The cargos may be delivered by viruses. In one example embodiment, viral vectors are used. A viral vector may comprise virally-derived DNA or RNA sequences for packaging into a virus (e.g., retroviruses, replication defective retroviruses, adenoviruses, replication defective adenoviruses, and adeno-associated viruses). Viral vectors also include polynucleotides carried by a virus for transfection into a host cell. Viruses and viral vectors may be used for in vitro, ex vivo, and/or in vivo deliveries.

### Adeno Associated Virus (AAV)

[0344] The systems and compositions herein may be delivered by adeno associated virus (AAV). AAV vectors may be used for such delivery. AAV, of the Dependovirus genus and Parvoviridae family, is a single stranded DNA virus. In one example embodiment, AAV may provide a persistent source of the provided DNA, as AAV delivered genomic material can exist indefinitely in cells, e.g., either as exogenous DNA or, with some modification, be directly integrated into the host DNA. In one example embodiment, AAV do not cause or relate with any diseases in humans. The virus itself is able to efficiently infect cells while provoking little to no innate or adaptive immune response or associated toxicity.

[0345] Examples of AAV that can be used herein include AAV-1, AAV-2, AAV-3, AAV-4, AAV-5, AAV-6, AAV-8, and AAV-9. The type of AAV may be selected with regard to the cells to be targeted, e.g., one can select AAV serotypes 1, 2, 5 or a hybrid capsid AAV1, AAV2, AAV5 or any combination thereof for targeting brain or neuronal cells; and one can select AAV4 for targeting cardiac tissue. AAV8 is useful for delivery to the liver. AAV-2-based vectors were originally proposed for CFTR delivery to CF airways, other serotypes such as AAV-1, AAV-5, AAV-6, and AAV-9 exhibit improved gene transfer efficiency in a variety of models of the lung epithelium. Examples of cell types targeted by AAV are described in Grimm, D. et al, J. Virol. 82: 5887-5911 (2008)), and shown as follows:

TABLE 8

| | AAV- | AAV- | AAV- | AAV- | AAV- | AAV- | AAV- | AAV- |
|---|---|---|---|---|---|---|---|---|
| Cell Line | 1 | 2 | 3 | 4 | 5 | 6 | 8 | 9 |
| Huh-7 | 13 | 100 | 2.5 | 0.0 | 0.1 | 10 | 0.7 | 0.0 |
| HEK293 | 25 | 100 | 2.5 | 0.1 | 0.1 | 5 | 0.7 | 0.1 |
| HeLa | 3 | 100 | 2.0 | 0.1 | 6.7 | 1 | 0.2 | 0.1 |
| HepG2 | 3 | 100 | 16.7 | 0.3 | 1.7 | 5 | 0.3 | ND |
| Hep1A | 20 | 100 | 0.2 | 1.0 | 0.1 | 1 | 0.2 | 0.0 |
| 911 | 17 | 100 | 11 | 0.2 | 0.1 | 17 | 0.1 | ND |
| CHO | 100 | 100 | 14 | 1.4 | 333 | 50 | 10 | 1.0 |
| COS | 33 | 100 | 33 | 3.3 | 5.0 | 14 | 2.0 | 0.5 |
| MeWo | 10 | 100 | 20 | 0.3 | 6.7 | 10 | 1.0 | 0.2 |
| NIH3T3 | 10 | 100 | 2.9 | 2.9 | 0.3 | 10 | 0.3 | ND |
| A549 | 14 | 100 | 20 | ND | 0.5 | 10 | 0.5 | 0.1 |
| HT1180 | 20 | 100 | 10 | 0.1 | 0.3 | 33 | 0.5 | 0.1 |
| Monocytes | 1111 | 100 | ND | ND | 125 | 1429 | ND | ND |
| Immature | 2500 | 100 | ND | ND | 222 | 2857 | ND | ND |
| DC | | | | | | | | |
| Mature DC | 2222 | 100 | ND | ND | 333 | 3333 | ND | ND |

[0346] AAV particles may be created in HEK 293 T cells. Once particles with specific tropism have been created, they are used to infect the target cell line much in the same way that native viral particles do. This may allow for persistent presence of CRISPR-Cas components in the infected cell type, and what makes this version of delivery particularly suited to cases where long-term expression is desirable. Examples of doses and formulations for AAV that can be used include those describe in U.S. Pat. Nos. 8,454,972 and 8,404,658.

[0347] Various strategies may be used for delivery the systems and compositions herein with AAVs. In some examples, coding sequences of Cas and gRNA may be packaged directly onto one DNA plasmid vector and delivered via one AAV particle. In some examples, AAVs may be used to deliver gRNAs into cells that have been previously engineered to express Cas. In some examples, coding sequences of Cas and gRNA may be made into two separate AAV particles, which are used for co-transfection of target cells. In some examples, markers, tags, and other sequences may be packaged in the same AAV particles as coding sequences of Cas and/or gRNAs.

### Lentiviruses

[0348] The systems and compositions herein may be delivered by lentiviruses. Lentiviral vectors may be used for such delivery. Lentiviruses are complex retroviruses that have the ability to infect and express their genes in both mitotic and post-mitotic cells.

[0349] Examples of lentiviruses include human immunodeficiency virus (HIV), which may use its envelope glycoproteins of other viruses to target a broad range of cell types; minimal non-primate lentiviral vectors based on the equine infectious anemia virus (EIAV), which may be used for ocular therapies. In certain embodiments, self-inactivating lentiviral vectors with an siRNA targeting a common exon shared by HIV tat/rev, a nucleolar-localizing TAR decoy, and an anti-CCR5-specific hammerhead ribozyme (see, e.g., DiGiusto et al. (2010) Sci Transl Med 2:36ra43) may be used/and or adapted to the nucleic acid-targeting system herein.

[0350] Lentiviruses may be pseudo-typed with other viral proteins, such as the G protein of vesicular stomatitis virus. In doing so, the cellular tropism of the lentiviruses can be altered to be as broad or narrow as desired. In some cases, to improve safety, second- and third-generation lentiviral systems may split essential genes across three plasmids, which may reduce the likelihood of accidental reconstitution of viable viral particles within cells.

[0351] In some examples, leveraging the integration ability, lentiviruses may be used to create libraries of cells comprising various genetic modifications, e.g., for screening and/or studying genes and signaling pathways.

### Adenoviruses

[0352] The systems and compositions herein may be delivered by adenoviruses. Adenoviral vectors may be used for such delivery. Adenoviruses include nonenveloped viruses with an icosahedral nucleocapsid containing a double stranded DNA genome. Adenoviruses may infect dividing and non-dividing cells. In one example embodiment, adenoviruses do not integrate into the genome of host cells, which may be used for limiting off-target effects of CRISPR-Cas systems in gene editing applications.

### Viral Vehicles for Delivery to Plants

[0353] The systems and compositions may be delivered to plant cells using viral vehicles. In particular embodiments, the compositions and systems may be introduced in the plant cells using a plant viral vector (e.g., as described in Scholthof et al. 1996, Annu Rev Phytopathol. 1996; 34:299-323). Such viral vector may be a vector from a DNA virus, e.g., geminivirus (e.g., cabbage leaf curl virus, bean yellow dwarf virus, wheat dwarf virus, tomato leaf curl virus, maize streak virus, tobacco leaf curl virus, or tomato golden mosaic virus) or nanovirus (e.g., Faba bean necrotic yellow virus). The viral vector may be a vector from an RNA virus, e.g., tobravirus (e.g., tobacco rattle virus, tobacco mosaic virus), potexvirus (e.g., potato virus X), or hordeivirus (e.g., barley stripe mosaic virus). The replicating genomes of plant viruses may be non-integrative vectors.

### Non-Viral Vehicles

[0354] The delivery vehicles may comprise non-viral vehicles. In general, methods and vehicles capable of delivering nucleic acids and/or proteins may be used for delivering the systems compositions herein. Examples of non-viral vehicles include lipid nanoparticles, cell-penetrating peptides (CPPs), DNA nanoclews, gold nanoparticles, streptolysin 0, multifunctional envelope-type nanodevices (MENDs), lipid-coated mesoporous silica particles, and other inorganic nanoparticles.

### Lipid Particles

[0355] The delivery vehicles may comprise lipid particles, e.g., lipid nanoparticles (LNPs) and liposomes.

### Lipid Nanoparticles (LNPs)

[0356] LNPs may encapsulate nucleic acids within cationic lipid particles (e.g., liposomes), and may be delivered to cells with relative ease. In some examples, lipid nanoparticles do not contain any viral components, which helps minimize safety and immunogenicity concerns. Lipid particles may be used for in vitro, ex vivo, and in vivo deliveries. Lipid particles may be used for various scales of cell populations.

[0357] In some examples. LNPs may be used for delivering DNA molecules (e.g., those comprising coding sequences of Cas and/or gRNA) and/or RNA molecules (e.g., mRNA of Cas, gRNAs). In certain cases, LNPs may be use for delivering RNP complexes of Cas/gRNA.

[0358] Components in LNPs may comprise cationic lipids 1,2-dilineoyl-3-dimethylammonium-propane (DLinDAP), 1,2-dilinoleyloxy-3-N,N-dimethylaminopropane (DLinDMA), 1,2-dilinoleyloxyketo-N,N-dimethyl-3-aminopropane (DlinK-DMA), 1,2-dilinoleyl-4-(2-dimethylaminoethyl)-[1,3]-dioxolane (DlinKC2-DMA), (3-o-[2″-(methoxypolyethyleneglycol 2000) succinoyl]-1,2-dimyristoyl-sn-glycol (PEG-S-DMG), R-3-[(ro-methoxy-poly(ethylene glycol)₂₀₀₀) carbamoyl]-1,2-dimyristyloxlpropyl-3-amine (PEG-C-DOMG, and any combination thereof. Preparation of LNPs and encapsulation may be adapted from Rosin et al, Molecular Therapy, vol. 19, no. 12, pages 1286-2200, December 2011).

### Liposomes

[0359] In one example embodiment, a lipid particle may be liposome. Liposomes are spherical vesicle structures composed of a uni- or multilamellar lipid bilayer surrounding internal aqueous compartments and a relatively impermeable outer lipophilic phospholipid bilayer. In one example embodiment, liposomes are biocompatible, nontoxic, can deliver both hydrophilic and lipophilic drug molecules, protect their cargo from degradation by plasma enzymes, and transport their load across biological membranes and the blood brain barrier (BBB).

[0360] Liposomes can be made from several different types of lipids, e.g., phospholipids. A liposome may comprise natural phospholipids and lipids such as 1,2-distearoryl-sn-glycero-3-phosphatidyl choline (DSPC), sphingomyelin, egg phosphatidylcholines, monosialoganglioside, or any combination thereof.

[0361] Several other additives may be added to liposomes in order to modify their structure and properties. For instance, liposomes may further comprise cholesterol, sphingomyelin, and/or 1,2-dioleoyl-sn-glycero-3-phosphoethanolamine (DOPE), e.g., to increase stability and/or to prevent the leakage of the liposomal inner cargo.

### Stable Nucleic-Acid-Lipid Particles (SNALPs)

[0362] In one example embodiment, the lipid particles may be stable nucleic acid lipid particles (SNALPs). SNALPs may comprise an ionizable lipid (DLinDMA) (e.g., cationic at low pH), a neutral helper lipid, cholesterol, a diffusible polyethylene glycol (PEG)-lipid, or any combination thereof. In some examples, SNALPs may comprise synthetic cholesterol, dipalmitoylphosphatidylcholine, 3-N-[(w-methoxy polyethylene glycol)₂₀₀₀)carbamoyl]-1,2-dimyrestyloxypropylamine, and cationic 1,2-dilinoleyloxy-3-N,Ndimethylaminopropane. In some examples, SNALPs may comprise synthetic cholesterol, 1,2-distearoyl-sn-glycero-3-phosphocholine, PEG-cDMA, and 1,2-dilinoleyloxy-3-(N;N-dimethyl)aminopropane (DLinDMA)

### Other Lipids

[0363] The lipid particles may also comprise one or more other types of lipids, e.g., cationic lipids, such as amino lipid 2,2-dilinoleyl-4-dimethylaminoethyl-[1,3]-dioxolane (Dlin-KC2-DMA), Dlin-KC2-DMA4, C12-200 and colipids disteroylphosphatidyl choline, cholesterol, and PEG-DMG.

### Lipoplexes/Polyplexes

[0364] In one example embodiment, the delivery vehicles comprise lipoplexes and/or polyplexes. Lipoplexes may bind to negatively charged cell membrane and induce endocytosis into the cells. Examples of lipoplexes may be complexes comprising lipid(s) and non-lipid components. Examples of lipoplexes and polyplexes include FuGENE-6 reagent, a non-liposomal solution containing lipids and other components, zwitterionic amino lipids (ZALs), Ca2b (e.g., forming DNA/Ca²⁺ microcomplexes), polyethenimine (PEI) (e.g., branched PEI), and poly(L-lysine) (PLL).

### Cell Penetrating Peptides

[0365] In one example embodiment, the delivery vehicles comprise cell penetrating peptides (CPPs). CPPs are short peptides that facilitate cellular uptake of various molecular cargo (e.g., from nanosized particles to small chemical molecules and large fragments of DNA).

[0366] CPPs may be of different sizes, amino acid sequences, and charges. In some examples, CPPs can translocate the plasma membrane and facilitate the delivery of various molecular cargoes to the cytoplasm or an organelle. CPPs may be introduced into cells via different mechanisms, e.g., direct penetration in the membrane, endocytosis-mediated entry, and translocation through the formation of a transitory structure.

[0367] CPPs may have an amino acid composition that either contains a high relative abundance of positively charged amino acids such as lysine or arginine or has sequences that contain an alternating pattern of polar/charged amino acids and non-polar, hydrophobic amino acids. These two types of structures are referred to as polycationic or amphipathic, respectively. A third class of CPPs are the hydrophobic peptides, containing only apolar residues, with low net charge or have hydrophobic amino acid groups that are crucial for cellular uptake. Another type of CPPs is the trans-activating transcriptional activator (Tat) from Human Immunodeficiency Virus 1 (HIV-1). Examples of CPPs include to Penetratin, Tat (48-60), Transportan, and (R-AhX-R4) (Ahx refers to aminohexanoyl), Kaposi fibroblast growth factor (FGF) signal peptide sequence, integrin (33 signal peptide sequence, polyarginine peptide Args sequence, Guanine rich-molecular transporters, and sweet arrow peptide. Examples of CPPs and related applications also include those described in U.S. Pat. No. 8,372,951.

[0368] CPPs can be used for in vitro and ex vivo work quite readily, and extensive optimization for each cargo and cell type is usually required. In some examples, CPPs may be covalently attached to the Cas protein directly, which is then complexed with the gRNA and delivered to cells. In some examples, separate delivery of CPP-Cas and CPP-gRNA to multiple cells may be performed. CPP may also be used to delivery RNPs.

[0369] CPPs may be used to deliver the compositions and systems to plants. In some examples, CPPs may be used to deliver the components to plant protoplasts, which are then regenerated to plant cells and further to plants.

### DNA Nanoclews

[0370] In one example embodiment, the delivery vehicles comprise DNA nanoclews. A DNA nanoclew refers to a sphere-like structure of DNA (e.g., with a shape of a ball of yarn). The nanoclew may be synthesized by rolling circle amplification with palindromic sequences that aide in the self-assembly of the structure. The sphere may then be loaded with a payload. An example of DNA nanoclew is described in Sun W et al, J Am Chem Soc. 2014 Oct. 22; 136(42):14722-5; and Sun W et al, Angew Chem Int Ed Engl. 2015 Oct. 5; 54(41):12029-33. DNA nanoclew may have a palindromic sequences to be partially complementary to the gRNA within the Cas:gRNA ribonucleoprotein complex. A DNA nanoclew may be coated, e.g., coated with PEI to induce endosomal escape.

### Gold Nanoparticles

[0371] In one example embodiment, the delivery vehicles comprise gold nanoparticles (also referred to AuNPs or colloidal gold). Gold nanoparticles may form complex with cargos, e.g., Cas:gRNA RNP. Gold nanoparticles may be coated, e.g., coated in a silicate and an endosomal disruptive polymer, Pasp(DET). Examples of gold nanoparticles include AuraSense Therapeutics' Spherical Nucleic Acid (SNA™) constructs, and those described in Mout R, et al. (2017). ACS Nano 11:2452-8; Lee K, et al. (2017). Nat Biomed Eng 1:889-901.

### Itop

[0372] In one example embodiment, the delivery vehicles comprise iTOP. iTOP refers to a combination of small molecules drives the highly efficient intracellular delivery of native proteins, independent of any transduction peptide. iTOP may be used for induced transduction by osmocytosis and propanebetaine, using NaCl-mediated hyperosmolality together with a transduction compound (propanebetaine) to trigger macropinocytotic uptake into cells of extracellular macromolecules. Examples of iTOP methods and reagents include those described in D'Astolfo D S, Pagliero R J, Pras A, et al. (2015). Cell 161:674-690.

### Polymer-Based Particles

[0373] In one example embodiment, the delivery vehicles may comprise polymer-based particles (e.g., nanoparticles). In one example embodiment, the polymer-based particles may mimic a viral mechanism of membrane fusion. The polymer-based particles may be a synthetic copy of Influenza virus machinery and form transfection complexes with various types of nucleic acids ((siRNA, miRNA, plasmid DNA or shRNA, mRNA) that cells take up via the endocytosis pathway, a process that involves the formation of an acidic compartment. The low pH in late endosomes acts as a chemical switch that renders the particle surface hydrophobic and facilitates membrane crossing. Once in the cytosol, the particle releases its payload for cellular action. This Active Endosome Escape technology is safe and maximizes transfection efficiency as it is using a natural uptake pathway. In one example embodiment, the polymer-based particles may comprise alkylated and carboxyalkylated branched polyethylenimine. In some examples, the polymer-based particles are VIROMER, e.g., VIROMER RNAi, VIROMER RED, VIROMER mRNA, VIROMER CRISPR. Example methods of delivering the systems and compositions herein include those described in Bawage S S et al., Synthetic mRNA expressed Cas13a mitigates RNA virus infections, www.biorxiv.org/content/10.1101/370460v1.full doi: doi.org/10.1101/370460, Viromer® RED, a powerful tool for transfection of keratinocytes. Doi: 10.13140/RG.2.2.16993.61281, Viromer® Transfection—Factbook 2018: technology, product overview, users' data., doi:10.13140/RG.2.2.23912.16642.

### Streptolysin 0 (SLO)

[0374] The delivery vehicles may be streptolysin 0 (SLO). SLO is a toxin produced by Group A streptococci that works by creating pores in mammalian cell membranes. SLO may act in a reversible manner, which allows for the delivery of proteins (e.g., up to 100 kDa) to the cytosol of cells without compromising overall viability. Examples of SLO include those described in Sierig G, et al. (2003). Infect Immun 71:446-55; Walev I, et al. (2001). Proc Natl Acad Sci USA 98:3185-90; Teng K W, et al. (2017). Elife 6:e25460.

### Multifunctional Envelope-Type Nanodevice (MEND)

[0375] The delivery vehicles may comprise multifunctional envelope-type nanodevice (MENDs). MENDs may comprise condensed plasmid DNA, a PLL core, and a lipid film shell. A MEND may further comprise cell-penetrating peptide (e.g., stearyl octaarginine). The cell penetrating peptide may be in the lipid shell. The lipid envelope may be modified with one or more functional components, e.g., one or more of: polyethylene glycol (e.g., to increase vascular circulation time), ligands for targeting of specific tissues/cells, additional cell-penetrating peptides (e.g., for greater cellular delivery), lipids to enhance endosomal escape, and nuclear delivery tags. In some examples, the MEND may be a tetra-lamellar MEND (T-MEND), which may target the cellular nucleus and mitochondria. In certain examples, a MEND may be a PEG-peptide-DOPE-conjugated MEND (PPD-MEND), which may target bladder cancer cells. Examples of MENDs include those described in Kogure K, et al. (2004). J Control Release 98:317-23; Nakamura T, et al. (2012). Acc Chem Res 45:1113-21.

### Lipid-Coated Mesoporous Silica Particles

[0376] The delivery vehicles may comprise lipid-coated mesoporous silica particles. Lipid-coated mesoporous silica particles may comprise a mesoporous silica nanoparticle core and a lipid membrane shell. The silica core may have a large internal surface area, leading to high cargo loading capacities. In one example embodiment, pore sizes, pore chemistry, and overall particle sizes may be modified for loading different types of cargos. The lipid coating of the particle may also be modified to maximize cargo loading, increase circulation times, and provide precise targeting and cargo release. Examples of lipid-coated mesoporous silica particles include those described in Du X, et al. (2014). Biomaterials 35:5580-90; Durfee P N, et al. (2016). ACS Nano 10:8325-45.

### Inorganic Nanoparticles

[0377] The delivery vehicles may comprise inorganic nanoparticles. Examples of inorganic nanoparticles include carbon nanotubes (CNTs) (e.g., as described in Bates K and Kostarelos K. (2013). Adv Drug Deliv Rev 65:2023-33.), bare mesoporous silica nanoparticles (MSNPs) (e.g., as described in Luo G F, et al. (2014). Sci Rep 4:6064), and dense silica nanoparticles (SiNPs) (as described in Luo D and Saltzman W M. (2000). Nat Biotechnol 18:893-5).

### Exosomes

[0378] The delivery vehicles may comprise exosomes. Exosomes include membrane bound extracellular vesicles, which can be used to contain and delivery various types of biomolecules, such as proteins, carbohydrates, lipids, and nucleic acids, and complexes thereof (e.g., RNPs). Examples of exosomes include those described in Schroeder A, et al., J Intern Med. 2010 January;267(1):9-21; E1-Andaloussi S, et al., Nat Protoc. 2012 December; 7(12):2112-26; Uno Y, et al., Hum Gene Ther. 2011 June;22(6):711-9; Zou W, et al., Hum Gene Ther. 2011 Apr;22(4):465-75.

[0379] In some examples, the exosome may form a complex (e.g., by binding directly or indirectly) to one or more components of the cargo. In certain examples, a molecule of an exosome may be with first adapter protein and a component of the cargo may be with a second adapter protein. The first and the second adapter protein may specifically bind each other, thus associating the cargo with the exosome. Examples of such exosomes include those described in Ye Y, et al., Biomater Sci. 2020 Apr 28. Doi: 10.1039/d0bm00427h.

### Applications in Plants and Fungi

[0380] The compositions, systems, and methods described herein can be used to perform gene or genome interrogation or editing or manipulation in plants and fungi. For example, the applications include investigation and/or selection and/or interrogations and/or comparison and/or manipulations and/or transformation of plant genes or genomes; e.g., to create, identify, develop, optimize, or confer trait(s) or characteristic(s) to plant(s) or to transform a plant or fugus genome. There can accordingly be improved production of plants, new plants with new combinations of traits or characteristics or new plants with enhanced traits. The compositions, systems, and methods can be used with regard to plants in Site-Directed Integration (SDI) or Gene Editing (GE) or any Near Reverse Breeding (NRB) or Reverse Breeding (RB) techniques.

[0381] The compositions, systems, and methods herein may be used to confer desired traits (e.g., enhanced nutritional quality, increased resistance to diseases and resistance to biotic and abiotic stress, and increased production of commercially valuable plant products or heterologous compounds) on essentially any plants and fungi, and their cells and tissues. The compositions, systems, and methods may be used to modify endogenous genes or to modify their expression without the permanent introduction into the genome of any foreign gene.

[0382] In one example embodiment, compositions, systems, and methods may be used in genome editing in plants or where RNAi or similar genome editing techniques have been used previously; see, e.g., Nekrasov, “Plant genome editing made easy: targeted mutagenesis in model and crop plants using the CRISPR-Cas system,” Plant Methods 2013, 9:39 (doi:10.1186/1746-4811-9-39); Brooks, “Efficient gene editing in tomato in the first generation using the CRISPR-Cas9 system,” Plant Physiology September 2014 pp 114.247577; Shan, “Targeted genome modification of crop plants using a CRISPR-Cas system,” Nature Biotechnology 31, 686-688 (2013); Feng, “Efficient genome editing in plants using a CRISPR/Cas system,” Cell Research (2013) 23:1229-1232. Doi:10.1038/cr.2013.114; published online 20 Aug. 2013; Xie, “RNA-guided genome editing in plants using a CRISPR-Cas system,” Mol Plant. 2013 November; 6(6):1975-83. Doi: 10.1093/mp/sst119. Epub 2013 Aug. 17; Xu, “Gene targeting using the Agrobacterium tumefaciens-mediated CRISPR-Cas system in rice,” Rice 2014, 7:5 (2014), Zhou et al., “Exploiting SNPs for biallelic CRISPR mutations in the outcrossing woody perennial Populus reveals 4-coumarate: CoA ligase specificity and Redundancy,” New Phytologist (2015) (Forum) 1-4 (available online only at www.newphytologist.com); Caliando et al, “Targeted DNA degradation using a CRISPR device stably carried in the host genome, NATURE COMMUNICATIONS 6:6989, DOI: 10.1038/ncomms7989, www.nature.com/naturecommunications DOI: 10.1038/ncomms7989; U.S. Pat. No. 6,603,061— Agrobacterium-Mediated Plant Transformation Method; U.S. Pat. No. 7,868,149— Plant Genome Sequences and Uses Thereof and US 2009/0100536— Transgenic Plants with Enhanced Agronomic Traits, Morrell et al “Crop genomics: advances and applications,” Nat Rev Genet. 2011 Dec. 29; 13(2):85-96, all the contents and disclosure of each of which are herein incorporated by reference in their entirety. Aspects of utilizing the compositions, systems, and methods may be analogous to the use of the CRISPR-Cas (e.g. CRISPR-Cas9) system in plants, and mention is made of the University of Arizona website “CRISPR-PLANT” (www.genome.arizona.edu/crispr/) (supported by Penn State and AGI).

[0383] The compositions, systems, and methods may also be used on protoplasts. A “protoplast” refers to a plant cell that has had its protective cell wall completely or partially removed using, for example, mechanical or enzymatic means resulting in an intact biochemical competent unit of living plant that can reform their cell wall, proliferate and regenerate grow into a whole plant under proper growing conditions.

[0384] The compositions, systems, and methods may be used for screening genes (e.g., endogenous, mutations) of interest. In some examples, genes of interest include those encoding enzymes involved in the production of a component of added nutritional value or generally genes affecting agronomic traits of interest, across species, phyla, and plant kingdom. By selectively targeting e.g. genes encoding enzymes of metabolic pathways, the genes responsible for certain nutritional aspects of a plant can be identified. Similarly, by selectively targeting genes which may affect a desirable agronomic trait, the relevant genes can be identified. Accordingly, the present invention encompasses screening methods for genes encoding enzymes involved in the production of compounds with a particular nutritional value and/or agronomic traits.

[0385] It is also understood that reference herein to animal cells may also apply, mutatis mutandis, to plant or fungal cells unless otherwise apparent; and, the enzymes herein having reduced off-target effects and systems employing such enzymes can be used in plant applications, including those mentioned herein.

[0386] In some cases, nucleic acids introduced to plants and fungi may be codon optimized for expression in the plants and fungi. Methods of codon optimization include those described in Kwon K C, et al., Codon Optimization to Enhance Expression Yields Insights into Chloroplast Translation, Plant Physiol. 2016 September;172(1):62-77.

[0387] The components (e.g., Cas proteins) in the compositions and systems may further comprise one or more functional domains described herein. In some examples, the functional domains may be an exonuclease. Such exonuclease may increase the efficiency of the Cas proteins' function, e.g., mutagenesis efficiency. An example of the functional domain is Trex2, as described in Weiss T et al., www.biorxiv.org/content/10.1101/2020.04.11.037572v1, doi: https://doi.org/10.1101/2020.04.11.037572.

### Examples of Plants

[0388] The compositions, systems, and methods herein can be used to confer desired traits on essentially any plant. A wide variety of plants and plant cell systems may be engineered for the desired physiological and agronomic characteristics. In general, the term “plant” relates to any various photosynthetic, eukaryotic, unicellular or multicellular organism of the kingdom Plantae characteristically growing by cell division, containing chloroplasts, and having cell walls comprised of cellulose. The term plant encompasses monocotyledonous and dicotyledonous plants.

[0389] The compositions, systems, and methods may be used over a broad range of plants, such as for example with dicotyledonous plants belonging to the orders Magniolales, Illiciales, Laurales, Piperales, Aristochiales, Nymphaeales, Ranunculales, Papeverales, Sarraceniaceae, Trochodendrales, Hamamelidales, Eucomiales, Leitneriales, Myricales, Fagales, Casuarinales, Caryophyllales, Batales, Polygonales, Plumbaginales, Dilleniales, Theales, Malvales, Urticales, Lecythidales, Violales, Salicales, Capparales, Ericales, Diapensales, Ebenales, Primulales, Rosales, Fabales, Podostemales, Haloragales, Myrtales, Cornales, Proteales, San tales, Rafflesiales, Celastrales, Euphorbiales, Rhamnales, Sapinokiles, Juglandales, Geraniales, Polygalales, Umbellales, Gentianales, Polemoniales, Lamiales, Plantaginales, Scrophulariales, Campanulales, Rubiales, Dipsacales, and Asterales; monocotyledonous plants such as those belonging to the orders Alismatales, Hydrocharitales, Najadales, Triuridales, Commelinales, Eriocaulales, Restionales, Poales, Juncales, Cyperales, Typhales, Bromeliales, Zingiberales, Arecales, Cyclanthales, Pandanales, Arales, Lilliales, and Orchid ales, or with plants belonging to Gymnospermae, e.g. those belonging to the orders Pinales, Ginkgoales, Cycadales, Araucariales, Cupressales and Gnetales.

[0390] The compositions, systems, and methods herein can be used over a broad range of plant species, included in the non-limitative list of dicot, monocot or gymnosperm genera hereunder: Atropa, Alseodaphne, Anacardium, Arachis, Beilschmiedia, Brassica, Carthamus, Cocculus, Croton, Cucumis, Citrus, Citrullus, Capsicum, Catharanthus, Cocos, Coffea, Cucurbita, Daucus, Duguetia, Eschscholzia, Ficus, Fragaria, Glaucium, Glycine, Gossypium, Helianthus, Hevea, Hyoscyamus, Lactuca, Landolphia, Linum, Litsea, Lycopersicon, Lupinus, Manihot, Majorana, Maims, Medicago, Nicotiana, Olea, Parthenium, Papaver, Persea, Phaseolus, Pistacia, Pisum, Pyrus, Prunus, Raphanus, Ricinus, Senecio, Sinomenium, Stephania, Sinapis, Solanum, Theobroma, Trifolium, Trigonella, Vicia, Vinca, Vilis, and Vigna; and the genera Allium, Andropogon, Aragrostis, Asparagus, Avena, Cynodon, Elaeis, Festuca, Festulolium, Heterocallis, Hordeum, Lemna, Lolium, Musa, Oryza, Panicum, Pannesetum, Phleum, Poa, Secale, Sorghum, Triticum, Zea, Abies, Cunninghamia, Ephedra, Picea, Pinus, and Pseudotsuga.

[0391] In one example embodiment, target plants and plant cells for engineering include those monocotyledonous and dicotyledonous plants, such as crops including grain crops (e.g., wheat, maize, rice, millet, barley), fruit crops (e.g., tomato, apple, pear, strawberry, orange), forage crops (e.g., alfalfa), root vegetable crops (e.g., carrot, potato, sugar beets, yam), leafy vegetable crops (e.g., lettuce, spinach); flowering plants (e.g., petunia, rose, chrysanthemum), conifers and pine trees (e.g., pine fir, spruce); plants used in phytoremediation (e.g., heavy metal accumulating plants); oil crops (e.g., sunflower, rape seed) and plants used for experimental purposes (e.g., Arabidopsis). Specifically, the plants are intended to comprise without limitation angiosperm and gymnosperm plants such as acacia, alfalfa, amaranth, apple, apricot, artichoke, ash tree, asparagus, avocado, banana, barley, beans, beet, birch, beech, blackberry, blueberry, broccoli, Brussel's sprouts, cabbage, canola, cantaloupe, carrot, cassava, cauliflower, cedar, a cereal, celery, chestnut, cherry, Chinese cabbage, citrus, clementine, clover, coffee, corn, cotton, cowpea, cucumber, cypress, eggplant, elm, endive, eucalyptus, fennel, figs, fir, geranium, grape, grapefruit, groundnuts, ground cherry, gum hemlock, hickory, kale, kiwifruit, kohlrabi, larch, lettuce, leek, lemon, lime, locust, pine, maidenhair, maize, mango, maple, melon, millet, mushroom, mustard, nuts, oak, oats, oil palm, okra, onion, orange, an ornamental plant or flower or tree, papaya, palm, parsley, parsnip, pea, peach, peanut, pear, peat, pepper, persimmon, pigeon pea, pine, pineapple, plantain, plum, pomegranate, potato, pumpkin, radicchio, radish, rapeseed, raspberry, rice, rye, sorghum, safflower, sallow, soybean, spinach, spruce, squash, strawberry, sugar beet, sugarcane, sunflower, sweet potato, sweet corn, tangerine, tea, tobacco, tomato, trees, triticale, turf grasses, turnips, vine, walnut, watercress, watermelon, wheat, yams, yew, and zucchini.

[0392] The term plant also encompasses Algae, which are mainly photoautotrophs unified primarily by their lack of roots, leaves and other organs that characterize higher plants. The compositions, systems, and methods can be used over a broad range of “algae” or “algae cells.” Examples of algae include eukaryotic phyla, including the Rhodophyta (red algae), Chlorophyta (green algae), Phaeophyta (brown algae), Bacillariophyta (diatoms), Eustigmatophyta and dinoflagellates as well as the prokaryotic phylum Cyanobacteria (blue-green algae). Examples of algae species include those of Amphora, Anabaena, Anikstrodesmis, Botryococcus, Chaetoceros, Chlamydomonas, Chlorella, Chlorococcum, Cyclotella, Cylindrotheca, Dunaliella, Emiliana, Euglena, Hematococcus, Isochrysis, Monochrysis, Monoraphidium, Nannochloris, Nannnochloropsis, Navicula, Nephrochloris, Nephroselmis, Nitzschia, Nodularia, Nostoc, Oochromonas, Oocystis, Oscillartoria, Pavlova, Phaeodactylum, Playtmonas, Pleurochrysis, Porhyra, Pseudoanabaena, Pyramimonas, Stichococcus, Synechococcus, Synechocystis, Tetraselmis, Thalassiosira, and Trichodesmium.

### Plant Promoters

[0393] In order to ensure appropriate expression in a plant cell, the components of the components and systems herein may be placed under control of a plant promoter. A plant promoter is a promoter operable in plant cells. A plant promoter is capable of initiating transcription in plant cells, whether or not its origin is a plant cell. The use of different types of promoters is envisaged.

[0394] In some examples, the plant promoter is a constitutive plant promoter, which is a promoter that is able to express the open reading frame (ORF) that it controls in all or nearly all of the plant tissues during all or nearly all developmental stages of the plant (referred to as “constitutive expression”). One example of a constitutive promoter is the cauliflower mosaic virus 35S promoter. In some examples, the plant promoter is a regulated promoter, which directs gene expression not constitutively, but in a temporally- and/or spatially-regulated manner, and includes tissue-specific, tissue-preferred and inducible promoters. Different promoters may direct the expression of a gene in different tissues or cell types, or at different stages of development, or in response to different environmental conditions. In some examples, the plant promoter is a tissue-preferred promoters, which can be utilized to target enhanced expression in certain cell types within a particular plant tissue, for instance vascular cells in leaves or roots or in specific cells of the seed.

[0395] Exemplary plant promoters include those obtained from plants, plant viruses, and bacteria such as Agrobacterium or Rhizobium which comprise genes expressed in plant cells. Additional examples of promoters include those described in Kawamata et al., (1997) Plant Cell Physiol 38:792-803; Yamamoto et al., (1997) Plant J 12:255-65; Hire et al, (1992) Plant Mol Biol 20:207-18,Kuster et al, (1995) Plant Mol Biol 29:759-72, and Capana et al., (1994) Plant Mol Biol 25:681-91.

[0396] In some examples, a plant promoter may be an inducible promoter, which is inducible and allows for spatiotemporal control of gene editing or gene expression may use a form of energy. The form of energy may include sound energy, electromagnetic radiation, chemical energy and/or thermal energy. Examples of inducible systems include tetracycline inducible promoters (Tet-On or Tet-Off), small molecule two-hybrid transcription activations systems (FKBP, ABA, etc), or light inducible systems (Phytochrome, LOV domains, or cryptochrome), such as a Light Inducible Transcriptional Effector (LITE) that direct changes in transcriptional activity in a sequence-specific manner. In a particular example, of the components of a light inducible system include a Cas protein, a light-responsive cytochrome heterodimer (e.g. from Arabidopsis thaliana), and a transcriptional activation/repression domain.

[0397] In some examples, the promoter may be a chemical-regulated promotor (where the application of an exogenous chemical induces gene expression) or a chemical-repressible promoter (where application of the chemical represses gene expression). Examples of chemical-inducible promoters include maize 1n2-2 promoter (activated by benzene sulfonamide herbicide safeners), the maize GST promoter (activated by hydrophobic electrophilic compounds used as pre-emergent herbicides), the tobacco PR-1 a promoter (activated by salicylic acid), promoters regulated by antibiotics (such as tetracycline-inducible and tetracycline-repressible promoters).

### Stable Integration in the Genome of Plants

[0398] In one example embodiment, polynucleotides encoding the components of the compositions and systems may be introduced for stable integration into the genome of a plant cell. In some cases, vectors or expression systems may be used for such integration. The design of the vector or the expression system can be adjusted depending on for when, where and under what conditions the guide RNA and/or the Cas gene are expressed. In some cases, the polynucleotides may be integrated into an organelle of a plant, such as a plastid, mitochondrion or a chloroplast. The elements of the expression system may be on one or more expression constructs which are either circular such as a plasmid or transformation vector, or non-circular such as linear double stranded DNA.

[0399] In one example embodiment, the method of integration generally comprises the steps of selecting a suitable host cell or host tissue, introducing the construct(s) into the host cell or host tissue, and regenerating plant cells or plants therefrom. In some examples, the expression system for stable integration into the genome of a plant cell may contain one or more of the following elements: a promoter element that can be used to express the RNA and/or Cas enzyme in a plant cell; a 5′ untranslated region to enhance expression; an intron element to further enhance expression in certain cells, such as monocot cells; a multiple-cloning site to provide convenient restriction sites for inserting the guide RNA and/or the Cas gene sequences and other desired elements; and a 3′ untranslated region to provide for efficient termination of the expressed transcript.

### Transient Expression in Plants

[0400] In one example embodiment, the components of the compositions and systems may be transiently expressed in the plant cell. In some examples, the compositions and systems may modify a target nucleic acid only when both the guide RNA and the Cas protein are present in a cell, such that genomic modification can further be controlled. As the expression of the Cas protein is transient, plants regenerated from such plant cells typically contain no foreign DNA. In certain examples, the Cas protein is stably expressed and the guide sequence is transiently expressed.

[0401] DNA and/or RNA (e.g., mRNA) may be introduced to plant cells for transient expression. In such cases, the introduced nucleic acid may be provided in sufficient quantity to modify the cell but do not persist after a contemplated period of time has passed or after one or more cell divisions.

[0402] The transient expression may be achieved using suitable vectors. Exemplary vectors that may be used for transient expression include a pEAQ vector (may be tailored for Agrobacterium-mediated transient expression) and Cabbage Leaf Curl virus (CaLCuV), and vectors described in Sainsbury F. et al., Plant Biotechnol J. 2009 September;7(7):682-93; and Yin K et al., Scientific Reports volume 5, Article number: 14926 (2015).

[0403] Combinations of the different methods described above are also envisaged.

Translocation to and/or Expression in Specific Plant Organelles

[0404] The compositions and systems herein may comprise elements for translocation to and/or expression in a specific plant organelle.

### Chloroplast Targeting

[0405] In one example embodiment, it is envisaged that the compositions and systems are used to specifically modify chloroplast genes or to ensure expression in the chloroplast. The compositions and systems (e.g., Cas proteins, guide molecules, or their encoding polynucleotides) may be transformed, compartmentalized, and/or targeted to the chloroplast. In an example, the introduction of genetic modifications in the plastid genome can reduce biosafety issues such as gene flow through pollen.

[0406] Examples of methods of chloroplast transformation include Particle bombardment, PEG treatment, and microinjection, and the translocation of transformation cassettes from the nuclear genome to the plastid. In some examples, targeting of chloroplasts may be achieved by incorporating in chloroplast localization sequence, and/or the expression construct a sequence encoding a chloroplast transit peptide (CTP) or plastid transit peptide, operably linked to the 5′ region of the sequence encoding the components of the compositions and systems. Additional examples of transforming, targeting and localization of chloroplasts include those described in WO2010061186, Protein Transport into Chloroplasts, 2010, Annual Review of Plant Biology, Vol. 61: 157-180, and US 20040142476, which are incorporated by reference herein in their entireties.

### Exemplary Applications in Plants

[0407] The compositions, systems, and methods may be used to generate genetic variation(s) in a plant (e.g., crop) of interest. One or more, e.g., a library of, guide molecules targeting one or more locations in a genome may be provided and introduced into plant cells together with the Cas effector protein. For example, a collection of genome-scale point mutations and gene knock-outs can be generated. In some examples, the compositions, systems, and methods may be used to generate a plant part or plant from the cells so obtained and screening the cells for a trait of interest. The target genes may include both coding and non-coding regions. In some cases, the trait is stress tolerance and the method is a method for the generation of stress-tolerant crop varieties.

[0408] In one example embodiment, the compositions, systems, and methods are used to modify endogenous genes or to modify their expression. The expression of the components may induce targeted modification of the genome, either by direct activity of the Cas nuclease and optionally introduction of template DNA, or by modification of genes targeted. The different strategies described herein above allow Cas-mediated targeted genome editing without requiring the introduction of the components into the plant genome.

[0409] In some cases, the modification may be performed without the permanent introduction into the genome of the plant of any foreign gene, including those encoding CRISPR components, so as to avoid the presence of foreign DNA in the genome of the plant. This can be of interest as the regulatory requirements for non-transgenic plants are less rigorous. Components which are transiently introduced into the plant cell are typically removed upon crossing.

[0410] For example, the modification may be performed by transient expression of the components of the compositions and systems. The transient expression may be performed by delivering the components of the compositions and systems with viral vectors, delivery into protoplasts, with the aid of particulate molecules such as nanoparticles or CPPs.

Generation of Plants with Desired Traits

[0411] The compositions, systems, and methods herein may be used to introduce desired traits to plants. The approaches include introduction of one or more foreign genes to confer a trait of interest, editing or modulating endogenous genes to confer a trait of interest.

### Agronomic Traits

[0412] In one example embodiment, crop plants can be improved by influencing specific plant traits. Examples of the traits include improved agronomic traits such as herbicide resistance, disease resistance, abiotic stress tolerance, high yield, and superior quality, pesticide-resistance, disease resistance, insect and nematode resistance, resistance against parasitic weeds, drought tolerance, nutritional value, stress tolerance, self-pollination voidance, forage digestibility biomass, and grain yield.

[0413] In one example embodiment, genes that confer resistance to pests or diseases may be introduced to plants. In cases there are endogenous genes that confer such resistance in a plants, their expression and function may be enhanced (e.g., by introducing extra copies, modifications that enhance expression and/or activity).

[0414] Examples of genes that confer resistance include plant disease resistance genes (e.g., Cf-9, Pto, RSP2, S1DMR6-1), genes conferring resistance to a pest (e.g., those described in WO96/30517), Bacillus thuringiensis proteins, lectins, Vitamin-binding proteins (e.g., avidin), enzyme inhibitors (e.g., protease or proteinase inhibitors or amylase inhibitors), insect-specific hormones or pheromones (e.g., ecdysteroid or a juvenile hormone, variant thereof, a mimetic based thereon, or an antagonist or agonist thereof) or genes involved in the production and regulation of such hormone and pheromones, insect-specific peptides or neuropeptide, Insect-specific venom (e.g., produced by a snake, a wasp, etc., or analog thereof), Enzymes responsible for a hyperaccumulation of a monoterpene, a sesquiterpene, a steroid, hydroxamic acid, a phenylpropanoid derivative or another nonprotein molecule with insecticidal activity, Enzymes involved in the modification of biologically active molecule (e.g., a glycolytic enzyme, a proteolytic enzyme, a lipolytic enzyme, a nuclease, a cyclase, a transaminase, an esterase, a hydrolase, a phosphatase, a kinase, a phosphorylase, a polymerase, an elastase, a chitinase and a glucanase, whether natural or synthetic), molecules that stimulates signal transduction, Viral-invasive proteins or a complex toxin derived therefrom, Developmental-arrestive proteins produced in nature by a pathogen or a parasite, a developmental-arrestive protein produced in nature by a plant, or any combination thereof.

[0415] The compositions, systems, and methods may be used to identify, screen, introduce or remove mutations or sequences lead to genetic variability that give rise to susceptibility to certain pathogens, e.g., host specific pathogens. Such approach may generate plants that are non-host resistance, e.g., the host and pathogen are incompatible or there can be partial resistance against all races of a pathogen, typically controlled by many genes and/or also complete resistance to some races of a pathogen but not to other races.

[0416] In one example embodiment, compositions, systems, and methods may be used to modify genes involved in plant diseases. Such genes may be removed, inactivated, or otherwise regulated or modified. Examples of plant diseases include those described in [0045]-[0080] of US20140213619A1, which is incorporated by reference herein in its entirety.

[0417] In one example embodiment, genes that confer resistance to herbicides may be introduced to plants. Examples of genes that confer resistance to herbicides include genes conferring resistance to herbicides that inhibit the growing point or meristem, such as an imidazolinone or a sulfonylurea, genes conferring glyphosate tolerance (e.g., resistance conferred by, e.g., mutant 5-enolpyruvylshikimate-3-phosphate synthase genes, aroA genes and glyphosate acetyl transferase (GAT) genes, respectively), or resistance to other phosphono compounds such as by glufosinate (phosphinothricin acetyl transferase (PAT) genes from Streptomyces species, including Streptomyces hygroscopicus and Streptomyces viridichromogenes), and to pyridinoxy or phenoxy proprionic acids and cyclohexones by ACCase inhibitor-encoding genes), genes conferring resistance to herbicides that inhibit photosynthesis (such as a triazine (psbA and gs+ genes) or a benzonitrile (nitrilase gene), and glutathione S-transferase), genes encoding enzymes detoxifying the herbicide or a mutant glutamine synthase enzyme that is resistant to inhibition, genes encoding a detoxifying enzyme is an enzyme encoding a phosphinothricin acetyltransferase (such as the bar or pat protein from Streptomyces species), genes encoding hydroxyphenylpyruvatedioxygenases (HPPD) inhibitors, e.g., naturally occurring HPPD resistant enzymes, and genes encoding a mutated or chimeric HPPD enzyme.

[0418] In one example embodiment, genes involved in Abiotic stress tolerance may be introduced to plants. Examples of genes include those capable of reducing the expression and/or the activity of poly(ADP-ribose) polymerase (PARP) gene, transgenes capable of reducing the expression and/or the activity of the PARG encoding genes, genes coding for a plant-functional enzyme of the nicotineamide adenine dinucleotide salvage synthesis pathway including nicotinamidase, nicotinate phosphoribosyltransferase, nicotinic acid mononucleotide adenyl transferase, nicotinamide adenine dinucleotide synthetase or nicotine amide phosphorybosyltransferase, enzymes involved in carbohydrate biosynthesis, enzymes involved in the production of polyfructose (e.g., the inulin and levan-type), the production of alpha-1,6 branched alpha-1,4-glucans, the production of alternan, the production of hyaluronan.

[0419] In one example embodiment, genes that improve drought resistance may be introduced to plants. Examples of genes Ubiquitin Protein Ligase protein (UPL) protein (UPL3), DR02, DR03, ABC transporter, and DREB1A.

### Nutritionally Improved Plants

[0420] In one example embodiment, the compositions, systems, and methods may be used to produce nutritionally improved plants. In some examples, such plants may provide functional foods, e.g., a modified food or food ingredient that may provide a health benefit beyond the traditional nutrients it contains. In certain examples, such plants may provide nutraceuticals foods, e.g., substances that may be considered a food or part of a food and provides health benefits, including the prevention and treatment of disease. The nutraceutical foods may be useful in the prevention and/or treatment of diseases in animals and humans, e.g., cancers, diabetes, cardiovascular disease, and hypertension.

[0421] An improved plant may naturally produce one or more desired compounds and the modification may enhance the level or activity or quality of the compounds. In some cases, the improved plant may not naturally produce the compound(s), while the modification enables the plant to produce such compound(s). In some cases, the compositions, systems, and methods used to modify the endogenous synthesis of these compounds indirectly, e.g. by modifying one or more transcription factors that controls the metabolism of this compound.

[0422] Examples of nutritionally improved plants include plants comprising modified protein quality, content and/or amino acid composition, essential amino acid contents, oils and fatty acids, carbohydrates, vitamins and carotenoids, functional secondary metabolites, and minerals. In some examples, the improved plants may comprise or produce compounds with health benefits. Examples of nutritionally improved plants include those described in Newell-McGloughlin, Plant Physiology, July 2008, Vol. 147, pp. 939-953.

[0423] Examples of compounds that can be produced include carotenoids (e.g., α-Carotene or (3-Carotene), lutein, lycopene, Zeaxanthin, Dietary fiber (e.g., insoluble fibers, β-Glucan, soluble fibers, fatty acids (e.g., co-3 fatty acids, Conjugated linoleic acid, GLA,), Flavonoids (e.g., Hydroxycinnamates, flavonols, catechins and tannins), Glucosinolates, indoles, isothiocyanates (e.g., Sulforaphane), Phenolics (e.g., stilbenes, caffeic acid and ferulic acid, epicatechin), Plant stanols/sterols, Fructans, inulins, fructo-oligosaccharides, Saponins, Soybean proteins, Phytoestrogens (e.g., isoflavones, lignans), Sulfides and thiols such as diallyl sulphide, Allyl methyl trisulfide, dithiolthiones, Tannins, such as proanthocyanidins, or any combination thereof.

[0424] The compositions, systems, and methods may also be used to modify protein/starch functionality, shelf life, taste/aesthetics, fiber quality, and allergen, antinutrient, and toxin reduction traits.

[0425] Examples of genes and nucleic acids that can be modified to introduce the traits include stearyl-ACP desaturase, DNA associated with the single allele which may be responsible for maize mutants characterized by low levels of phytic acid, Tf RAP2.2 and its interacting partner SINAT2, Tf Dofl, and DOF Tf AtDof1.1 (OBP2).

### Modification of Polyploid Plants

[0426] The compositions, systems, and methods may be used to modify polyploid plants. Polyploid plants carry duplicate copies of their genomes (e.g. as many as six, such as in wheat). In some cases, the compositions, systems, and methods may be can be multiplexed to affect all copies of a gene, or to target dozens of genes at once. For instance, the compositions, systems, and methods may be used to simultaneously ensure a loss of function mutation in different genes responsible for suppressing defenses against a disease. The modification may be simultaneous suppression the expression of the TaMLO-A1, TaMLO-B1 and TaMLO-D1 nucleic acid sequence in a wheat plant cell and regenerating a wheat plant therefrom, in order to ensure that the wheat plant is resistant to powdery mildew (e.g., as described in WO2015109752).

### Regulation of Fruit-Ripening

[0427] The compositions, systems, and methods may be used to regulate ripening of fruits. Ripening is a normal phase in the maturation process of fruits and vegetables. Only a few days after it starts it may render a fruit or vegetable inedible, which can bring significant losses to both farmers and consumers.

[0428] In one example embodiment, the compositions, systems, and methods are used to reduce ethylene production. In some examples, the compositions, systems, and methods may be used to suppress the expression and/or activity of ACC synthase, insert a ACC deaminase gene or a functional fragment thereof, insert a SAM hydrolase gene or functional fragment thereof, suppress ACC oxidase gene expression.

[0429] Alternatively or additionally, the compositions, systems, and methods may be used to modify ethylene receptors (e.g., suppressing ETR1) and/or Polygalacturonase (PG). Suppression of a gene may be achieved by introducing a mutation, an antisense sequence, and/or a truncated copy of the gene to the genome.

### Increasing Storage Life of Plants

[0430] In one example embodiment, the compositions, systems, and methods are used to modify genes involved in the production of compounds which affect storage life of the plant or plant part. The modification may be in a gene that prevents the accumulation of reducing sugars in potato tubers. Upon high-temperature processing, these reducing sugars react with free amino acids, resulting in brown, bitter-tasting products and elevated levels of acrylamide, which is a potential carcinogen. In particular embodiments, the methods provided herein are used to reduce or inhibit expression of the vacuolar invertase gene (Vine), which encodes a protein that breaks down sucrose to glucose and fructose.

### Reducing Allergens in Plants

[0431] In one example embodiment, the compositions, systems, and methods are used to generate plants with a reduced level of allergens, making them safer for consumers. To this end, the compositions, systems, and methods may be used to identify and modify (e.g., suppress) one or more genes responsible for the production of plant allergens. Examples of such genes include Lol p5, as well as those in peanuts, soybeans, lentils, peas, lupin, green beans, mung beans, such as those described in Nicolaou et al., Current Opinion in Allergy and Clinical Immunology 2011; 11(3):222), which is incorporated by reference herein in its entirety.

### Generation of Male Sterile Plants

[0432] The compositions, systems, and methods may be used to generate male sterile plants. Hybrid plants typically have advantageous agronomic traits compared to inbred plants. However, for self-pollinating plants, the generation of hybrids can be challenging. In different plant types (e.g., maize and rice), genes have been identified which are important for plant fertility, more particularly male fertility. Plants that are as such genetically altered can be used in hybrid breeding programs.

[0433] The compositions, systems, and methods may be used to modify genes involved male fertility, e.g., inactivating (such as by introducing mutations to) genes required for male fertility. Examples of the genes involved in male fertility include cytochrome P450-like gene (MS26) or the meganuclease gene (MS45), and those described in Wan X et al., Mol Plant. 2019 Mar. 4; 12(3):321-342; and Kim Y J, et al., Trends Plant Sci. 2018 January;23(1):53-65.

### Increasing the Fertility Stage in Plants

[0434] In one example embodiment, the compositions, systems, and methods may be used to prolong the fertility stage of a plant such as of a rice. For instance, a rice fertility stage gene such as Ehd3 can be targeted in order to generate a mutation in the gene and plantlets can be selected for a prolonged regeneration plant fertility stage.

### Production of Early Yield of Products

[0435] In one example embodiment, the compositions, systems, and methods may be used to produce early yield of the product. For example, flowering process may be modulated, e.g., by mutating flowering repressor gene such as SPSG. Examples of such approaches include those described in Soyk S, et al., Nat Genet. 2017 January;49(1):162-168.

### Oil and Biofuel Production

[0436] The compositions, systems, and methods may be used to generate plants for oil and biofuel production. Biofuels include fuels made from plant and plant-derived resources. Biofuels may be extracted from organic matter whose energy has been obtained through a process of carbon fixation or are made through the use or conversion of biomass. This biomass can be used directly for biofuels or can be converted to convenient energy containing substances by thermal conversion, chemical conversion, and biochemical conversion. This biomass conversion can result in fuel in solid, liquid, or gas form. Biofuels include bioethanol and biodiesel. Bioethanol can be produced by the sugar fermentation process of cellulose (starch), which may be derived from maize and sugar cane. Biodiesel can be produced from oil crops such as rapeseed, palm, and soybean. Biofuels can be used for transportation.

### Generation of Plants for Production of Vegetable Oils and Biofuels

[0437] The compositions, systems, and methods may be used to generate algae (e.g., diatom) and other plants (e.g., grapes) that express or overexpress high levels of oil or biofuels.

[0438] In some cases, the compositions, systems, and methods may be used to modify genes involved in the modification of the quantity of lipids and/or the quality of the lipids. Examples of such genes include those involved in the pathways of fatty acid synthesis, e.g., acetyl-CoA carboxylase, fatty acid synthase, 3-ketoacyl acyl-carrier protein synthase III, glycerol-3-phospate dehydrogenase (G3PDH), Enoyl-acyl carrier protein reductase (Enoyl-ACP-reductase), glycerol-3-phosphate acyltransferase, lysophosphatidic acyl transferase or diacylglycerol acyltransferase, phospholipid: diacylglycerol acyltransferase, phoshatidate phosphatase, fatty acid thioesterase such as palmitoyl protein thioesterase, or malic enzyme activities.

[0439] In further embodiments it is envisaged to generate diatoms that have increased lipid accumulation. This can be achieved by targeting genes that decrease lipid catabolization. Examples of genes include those involved in the activation of triacylglycerol and free fatty acids, β-oxidation of fatty acids, such as genes of acyl-CoA synthetase, 3-ketoacyl-CoA thiolase, acyl-CoA oxidase activity and phosphoglucomutase.

[0440] In some examples, algae may be modified for production of oil and biofuels, including fatty acids (e.g., fatty esters such as acid methyl esters (FAME) and fatty acid ethyl esters (FAEE)). Examples of methods of modifying microalgae include those described in Stovicek et al. Metab. Eng. Comm., 2015; 2:1; U.S. Pat. No. 8,945,839; and WO 2015086795.

[0441] In some examples, one or more genes may be introduced (e.g., overexpressed) to the plants (e.g., algae) to produce oils and biofuels (e.g., fatty acids) from a carbon source (e.g., alcohol). Examples of the genes include genes encoding acyl-CoA synthases, ester synthases, thioesterases (e.g., tesA, ′tesA, tesB, fatB, fatB2, fatB3, 190ho1e, or fatA), acyl-CoA synthases (e.g., fadD, JadK, BH3103, pfl-4354, EAV15023, fadD1, fadD2, RPC 4074,fadDD35, fadDD22, faa39), ester synthases (e.g., synthase/acyl-CoA:diacylglycerl acyltransferase from Simmondsia chinensis, Acinetobacter sp. ADP, Alcanivorax borkumensis, Pseudomonas aeruginosa, Fundibacter jadensis, Arabidopsis thaliana, or Alkaligenes eutrophus, or variants thereof).

[0442] Additionally or alternatively, one or more genes in the plants (e.g., algae) may be inactivated (e.g., expression of the genes is decreased). For examples, one or more mutations may be introduced to the genes. Examples of such genes include genes encoding acyl-CoA dehydrogenases (e.g., fade), outer membrane protein receptors, and transcriptional regulator (e.g., repressor) of fatty acid biosynthesis (e.g., fabR), pyruvate formate lyases (e.g., pflB), lactate dehydrogenases (e.g., IdhA).

### Organic Acid Production

[0443] In one example embodiment, plants may be modified to produce organic acids such as lactic acid. The plants may produce organic acids using sugars, pentose or hexose sugars. To this end, one or more genes may be introduced (e.g., and overexpressed) in the plants. An example of such genes include LDH gene.

[0444] In some examples, one or more genes may be inactivated (e.g., expression of the genes is decreased). For examples, one or more mutations may be introduced to the genes. The genes may include those encoding proteins involved an endogenous metabolic pathway which produces a metabolite other than the organic acid of interest and/or wherein the endogenous metabolic pathway consumes the organic acid.

[0445] Examples of genes that can be modified or introduced include those encoding pyruvate decarboxylases (pdc), fumarate reductases, alcohol dehydrogenases (adh), acetaldehyde dehydrogenases, phosphoenolpyruvate carboxylases (ppc), D-lactate dehydrogenases (d-ldh), L-lactate dehydrogenases (l-ldh), lactate 2-monooxygenases, lactate dehydrogenase, cytochrome-dependent lactate dehydrogenases (e.g., cytochrome B2-dependent L-lactate dehydrogenases).

### Enhancing Plant Properties for Biofuel Production

[0446] In one example embodiment, the compositions, systems, and methods are used to alter the properties of the cell wall of plants to facilitate access by key hydrolyzing agents for a more efficient release of sugars for fermentation. By reducing the proportion of lignin in a plant the proportion of cellulose can be increased. In particular embodiments, lignin biosynthesis may be downregulated in the plant so as to increase fermentable carbohydrates.

[0447] In some examples, one or more lignin biosynthesis genes may be down regulated. Examples of such genes include 4-coumarate 3-hydroxylases (C3H), phenylalanine ammonia-lyases (PAL), cinnamate 4-hydroxylases (C4H), hydroxycinnamoyl transferases (HCT), caffeic acid O-methyltransferases (COMT), caffeoyl CoA 3-O-methyltransferases (CCoAOMT), ferulate 5-hydroxylases (F5H), cinnamyl alcohol dehydrogenases (CAD), cinnamoyl CoA-reductases (CCR), 4-coumarate-CoA ligases (4CL), monolignol-lignin-specific glycosyltransferases, and aldehyde dehydrogenases (ALDH), and those described in WO 2008064289.

[0448] In some examples, plant mass that produces lower level of acetic acid during fermentation may be reduced. To this end, genes involved in polysaccharide acetylation (e.g., Cas1L and those described in WO 2010096488) may be inactivated.

### Other Microorganisms for Oils and Biofuel Production

[0449] In one example embodiment, microorganisms other than plants may be used for production of oils and biofuels using the compositions, systems, and methods herein. Examples of the microorganisms include those of the genus of Escherichia, Bacillus, Lactobacillus, Rhodococcus, Synechococcus, Synechoystis, Pseudomonas, Aspergillus, Trichoderma, Neurospora, Fusarium, Humicola, Rhizomucor, Kluyveromyces, Pichia, Mucor, Myceliophtora, Penicillium, Phanerochaete, Pleurotus, Trametes, Chrysosporium, Saccharomyces, Stenotrophamonas, Schizosaccharomyces, Yarrowia, or Streptomyces.

### Plant Cultures and Regeneration

[0450] In one example embodiment, the modified plants or plant cells may be cultured to regenerate a whole plant which possesses the transformed or modified genotype and thus the desired phenotype. Examples of regeneration techniques include those relying on manipulation of certain phytohormones in a tissue culture growth medium, relying on a biocide and/or herbicide marker which has been introduced together with the desired nucleotide sequences, obtaining from cultured protoplasts, plant callus, explants, organs, pollens, embryos or parts thereof.

### Detecting Modifications in the Plant Genome-Selectable Markers

[0451] When the compositions, systems, and methods are used to modify a plant, suitable methods may be used to confirm and detect the modification made in the plant. In some examples, when a variety of modifications are made, one or more desired modifications or traits resulting from the modifications may be selected and detected. The detection and confirmation may be performed by biochemical and molecular biology techniques such as Southern analysis, PCR, Northern blot, S1 Rnase protection, primer-extension or reverse transcriptase-PCR, enzymatic assays, ribozyme activity, gel electrophoresis, Western blot, immunoprecipitation, enzyme-linked immunoassays, in situ hybridization, enzyme staining, and immunostaining.

[0452] In some cases, one or more markers, such as selectable and detectable markers, may be introduced to the plants. Such markers may be used for selecting, monitoring, isolating cells and plants with desired modifications and traits. A selectable marker can confer positive or negative selection and is conditional or non-conditional on the presence of external substrates. Examples of such markers include genes and proteins that confer resistance to antibiotics, such as hygromycin (hpt) and kanamycin (nptII), and genes that confer resistance to herbicides, such as phosphinothricin (bar) and chlorosulfuron (als), enzyme capable of producing or processing a colored substances (e.g., the β-glucuronidase, luciferase, B or Cl genes).

### Applications in Fungi

[0453] The compositions, systems, and methods described herein can be used to perform efficient and cost effective gene or genome interrogation or editing or manipulation in fungi or fungal cells, such as yeast. The approaches and applications in plants may be applied to fungi as well.

[0454] A fungal cell may be any type of eukaryotic cell within the kingdom of fungi, such as phyla of Ascomycota, Basidiomycota, Blastocladiomycota, Chytridiomycota, Glomeromycota, Microsporidia, and Neocallimastigomycota. Examples of fungi or fungal cells in include yeasts, molds, and filamentous fungi.

[0455] In one example embodiment, the fungal cell is a yeast cell. A yeast cell refers to any fungal cell within the phyla Ascomycota and Basidiomycota. Examples of yeasts include budding yeast, fission yeast, and mold, S. cerervisiae, Kluyveromyces marxianus, Issatchenkia orientalis, Candida spp. (e.g., Candida albicans), Yarrowia spp. (e.g., Yarrowia lipolytica), Pichia spp. (e.g., Pichia pastoris), Kluyveromyces spp. (e.g., Kluyveromyces lactis and Kluyveromyces marxianus), Neurospora spp. (e.g., Neurospora crassa), Fusarium spp. (e.g., Fusarium oxysporum), and Issatchenkia spp. (e.g., Issatchenkia orientalis, Pichia kudriavzevii and Candida acidothermophilum).

[0456] In one example embodiment, the fungal cell is a filamentous fungal cell, which grow in filaments, e.g., hyphae or mycelia. Examples of filamentous fungal cells include Aspergillus spp. (e.g., Aspergillus niger), Trichoderma spp. (e.g., Trichoderma reesei), Rhizopus spp. (e.g., Rhizopus oryzae), and Mortierella spp. (e.g., Mortierella 193holerae 193193).

[0457] In one example embodiment, the fungal cell is of an industrial strain. Industrial strains include any strain of fungal cell used in or isolated from an industrial process, e.g., production of a product on a commercial or industrial scale. Industrial strain may refer to a fungal species that is typically used in an industrial process, or it may refer to an isolate of a fungal species that may be also used for non-industrial purposes (e.g., laboratory research). Examples of industrial processes include fermentation (e.g., in production of food or beverage products), distillation, biofuel production, production of a compound, and production of a polypeptide. Examples of industrial strains include, without limitation, JAY270 and ATCC4124.

[0458] In one example embodiment, the fungal cell is a polyploid cell whose genome is present in more than one copy. Polyploid cells include cells naturally found in a polyploid state, and cells that has been induced to exist in a polyploid state (e.g., through specific regulation, alteration, inactivation, activation, or modification of meiosis, cytokinesis, or DNA replication). A polyploid cell may be a cell whose entire genome is polyploid, or a cell that is polyploid in a particular genomic locus of interest. In some examples, the abundance of guide RNA may more often be a rate-limiting component in genome engineering of polyploid cells than in haploid cells, and thus the methods using the CRISPR system described herein may take advantage of using certain fungal cell types.

[0459] In one example embodiment, the fungal cell is a diploid cell, whose genome is present in two copies. Diploid cells include cells naturally found in a diploid state, and cells that have been induced to exist in a diploid state (e.g., through specific regulation, alteration, inactivation, activation, or modification of meiosis, cytokinesis, or DNA replication). A diploid cell may refer to a cell whose entire genome is diploid, or it may refer to a cell that is diploid in a particular genomic locus of interest.

[0460] In one example embodiment, the fungal cell is a haploid cell, whose genome is present in one copy. Haploid cells include cells naturally found in a haploid state, or cells that have been induced to exist in a haploid state (e.g., through specific regulation, alteration, inactivation, activation, or modification of meiosis, cytokinesis, or DNA replication). A haploid cell may refer to a cell whose entire genome is haploid, or it may refer to a cell that is haploid in a particular genomic locus of interest.

[0461] The compositions and systems, and nucleic acid encoding thereof, may be introduced to fungi cells using the delivery systems and methods herein. Examples of delivery systems include lithium acetate treatment, bombardment, electroporation, and those described in Kawai et al., 2010, Bioeng Bugs. 2010 Nov.-Dec.; 1(6): 395-403.

[0462] In some examples, a yeast expression vector (e.g., those with one or more regulatory elements) may be used. Examples of such vectors include a centromeric (CEN) sequence, an autonomous replication sequence (ARS), a promoter, such as an RNA Polymerase III promoter, operably linked to a sequence or gene of interest, a terminator such as an RNA polymerase III terminator, an origin of replication, and a marker gene (e.g., auxotrophic, antibiotic, or other selectable markers). Examples of expression vectors for use in yeast may include plasmids, yeast artificial chromosomes, 2μ plasmids, yeast integrative plasmids, yeast replicative plasmids, shuttle vectors, and episomal plasmids.

### Biofuel and Materials Production by Fungi

[0463] In one example embodiment, the compositions, systems, and methods may be used for generating modified fungi for biofuel and material productions. For instance, the modified fungi for production of biofuel or biopolymers from fermentable sugars and optionally to be able to degrade plant-derived lignocellulose derived from agricultural waste as a source of fermentable sugars. Foreign genes required for biofuel production and synthesis may be introduced in to fungi In some examples, the genes may encode enzymes involved in the conversion of pyruvate to ethanol or another product of interest, degrade cellulose (e.g., cellulase), endogenous metabolic pathways which compete with the biofuel production pathway.

[0464] In some examples, the compositions, systems, and methods may be used for generating and/or selecting yeast strains with improved xylose or cellobiose utilization, isoprenoid biosynthesis, and/or lactic acid production. One or more genes involved in the metabolism and synthesis of these compounds may be modified and/or introduced to yeast cells. Examples of the methods and genes include lactate dehydrogenase, PDC1 and PDC5, and those described in Ha, S. J., et al. (2011) Proc. Natl. Acad. Sci. USA 108(2):504-9 and Galazka, J. M., et al. (2010) Science 330(6000):84-6; Jakoeianas T et al., Metab Eng. 2015 Mar.;28:213-222; Stovicek V, et al., FEMS Yeast Res. 2017 Aug. 1; 17(5).

### Improved Plants and Yeast Cells

[0465] The present disclosure further provides improved plants and fungi. The improved and fungi may comprise one or more genes introduced, and/or one or more genes modified by the compositions, systems, and methods herein. The improved plants and fungi may have increased food or feed production (e.g., higher protein, carbohydrate, nutrient or vitamin levels), oil and biofuel production (e.g., methanol, ethanol), tolerance to pests, herbicides, drought, low or high temperatures, excessive water, etc.

[0466] The plants or fungi may have one or more parts that are improved, e.g., leaves, stems, roots, tubers, seeds, endosperm, ovule, and pollen. The parts may be viable, nonviable, regeneratable, and/or non-regeneratable.

[0467] The improved plants and fungi may include gametes, seeds, embryos, either zygotic or somatic, progeny and/or hybrids of improved plants and fungi. The progeny may be a clone of the produced plant or fungi, or may result from sexual reproduction by crossing with other individuals of the same species to introgress further desirable traits into their offspring. The cell may be in vivo or ex vivo in the cases of multicellular organisms, particularly plants.

### Further Applications of the CRISPR-Cas System in Plants

[0468] Further applications of the compositions, systems, and methods on plants and fungi include visualization of genetic element dynamics (e.g., as described in Chen B, et al., Cell. 2013 Dec. 19; 155(7):1479-91), targeted gene disruption positive-selection in vitro and in vivo (as described in Malina A et al., Genes Dev. 2013 Dec. 1; 27(23):2602-14), epigenetic modification such as using fusion of Cas and histone-modifying enzymes (e.g., as described in Rusk N, Nat Methods. 2014 January;11(1):28), identifying transcription regulators (e.g., as described in Waldrip Z J, Epigenetics. 2014 September;9(9):1207-11), anti-virus treatment for both RNA and DNA viruses (e.g., as described in Price A A, et al., Proc Natl Acad Sci USA. 2015 May 12;112(19):6164-9; Ramanan Vet al., Sci Rep. 2015 Jun. 2; 5:10833), alteration of genome complexity such as chromosome numbers (e.g., as described in Karimi-Ashtiyani Ret al., Proc Natl Acad Sci USA. 2015 Sep. 8; 112(36):11211-6; Anton T, et al., Nucleus. 2014 Mar.-Apr.;5(2):163-72), self-cleavage of the CRISPR system for controlled inactivation/activation (e.g., as described Sugano S S et al., Plant Cell Physiol. 2014 March;55(3):475-81), multiplexed gene editing (as described in Kabadi A M et al., Nucleic Acids Res. 2014 Oct. 29; 42(19):e147), development of kits for multiplex genome editing (as described in Xing H L et al., BMC Plant Biol. 2014 Nov. 29; 14:327), starch production (as described in Hebelstrup K H et al., Front Plant Sci. 2015 Apr. 23; 6:247), targeting multiple genes in a family or pathway (e.g., as described in Ma X et al., Mol Plant. 2015 August; 8(8):1274-84), regulation of non-coding genes and sequences (e.g., as described in Lowder L G, et al., Plant Physiol. 2015 October;169(2):971-85), editing genes in trees (e.g., as described in Belhaj K et al., Plant Methods. 2013 Oct. 11; 9(1):39; Harrison M M, et al., Genes Dev. 2014 Sep. 1; 28(17):1859-72; Zhou X et al., New Phytol. 2015 Oct;208(2):298-301), introduction of mutations for resistance to host-specific pathogens and pests.

[0469] Additional examples of modifications of plants and fungi that may be performed using the compositions, systems, and methods include those described in International Patent Publication Nos. WO2016/099887, WO2016/025131, WO2016/073433, WO2017/066175, WO2017/100158, WO 2017/105991, WO2017/106414, WO2016/100272, WO2016/100571, WO 2016/100568, WO 2016/100562, and WO 2017/019867.

### Applications in Non-Human Animals

[0470] The compositions, systems, and methods may be used to study and modify non-human animals, e.g., introducing desirable traits and disease resilience, treating diseases, facilitating breeding, etc. In one example embodiment, the compositions, systems, and methods may be used to improve breeding and introducing desired traits, e.g., increasing the frequency of trait-associated alleles, introgression of alleles from other breeds/species without linkage drag, and creation of de novo favorable alleles. Genes and other genetic elements that can be targeted may be screened and identified. Examples of application and approaches include those described in Tait-Burkard C, et al., Livestock 2.0— genome editing for fitter, healthier, and more productive farmed animals. Genome Biol. 2018 Nov. 26; 19(1):204; Lillico S, Agricultural applications of genome editing in farmed animals. Transgenic Res. 2019 August;28(Suppl 2):57-60; Houston R D, et al., Harnessing genomics to fast-track genetic improvement in aquaculture. Nat Rev Genet. 2020 Apr 16. Doi: 10.1038/s41576-020-0227-y, which are incorporated herein by reference in their entireties. Applications described in other sections such as therapeutic, diagnostic, etc. can also be used on the animals herein.

[0471] The compositions, systems, and methods may be used on animals such as fish, amphibians, reptiles, mammals, and birds. The animals may be farm and agriculture animals, or pets. Examples of farm and agriculture animals include horses, goats, sheep, swine, cattle, llamas, alpacas, and birds, e.g., chickens, turkeys, ducks, and geese. The animals may be a non-human primate, e.g., baboons, capuchin monkeys, chimpanzees, lemurs, macaques, marmosets, tamarins, spider monkeys, squirrel monkeys, and vervet monkeys. Examples of pets include dogs, cats horses, wolfs, rabbits, ferrets, gerbils, hamsters, chinchillas, fancy rats, guinea pigs, canaries, parakeets, and parrots.

[0472] In one example embodiment, one or more genes may be introduced (e.g., overexpressed) in the animals to obtain or enhance one or more desired traits. Growth hormones, insulin-like growth factors (IGF-1) may be introduced to increase the growth of the animals, e.g., pigs or salmon (such as described in Pursel V G et al., J Reprod Fertil Suppl. 1990; 40:235-45; Waltz E, Nature. 2017; 548:148). Fat-1 gene (e.g., from C elegans) may be introduced for production of larger ratio of n-3 to n-6 fatty acids may be induced, e.g. in pigs (such as described in Li M, et al., Genetics. 2018; 8:1747-54). Phytase (e.g., from E coli) xylanase (e.g., from Aspergillus niger), beta-glucanase (e.g., from bacillus lichenformis) may be introduced to reduce the environmental impact through phosphorous and nitrogen release reduction, e.g. in pigs (such as described in Golovan S P, et al., Nat Biotechnol. 2001; 19:741-5; Zhang X et al., elife. 2018). shRNA decoy may be introduced to induce avian influenza resilience e.g. in chicken (such as described in Lyall et al., Science. 2011; 331:223-6). Lysozyme or lysostaphin may be introduced to induce mastitis resilience e.g., in goat and cow (such as described in Maga E A et al., Foodborne Pathog Dis. 2006; 3:384-92; Wall R J, et al., Nat Biotechnol. 2005; 23:445-51). Histone deacetylase such as HDAC6 may be introduced to induce PRRSV resilience, e.g., in pig (such as described in Lu T., et al., PloS One. 2017;12:e0169317). CD163 may be modified (e.g., inactivated or removed) to introduce PRRSV resilience in pigs (such as described in Prather R S et al., Sci Rep. 2017 Oct. 17; 7(1):13371). Similar approaches may be used to inhibit or remove viruses and bacteria (e.g., Swine Influenza Virus (SIV) strains which include influenza C and the subtypes of influenza A known as H1N1, H1N2, H2N1, H3N1, H3N2, and H2N3, as well as pneumonia, meningitis and oedema) that may be transmitted from animals to humans.

[0473] In one example embodiment, one or more genes may be modified or edited for disease resistance and production traits. Myostatin (e.g., GDF8) may be modified to increase muscle growth, e.g., in cow, sheep, goat, catfish, and pig (such as described in Crispo M et al., PloS One 2015;10:e0136690; Wang X, et al., Anim Genet. 2018; 49:43-51; Khalil K, et al., Sci Rep. 2017; 7:7301; Kang J-D, et al., RSC Adv. 2017; 7:12541-9). Pc POLLED may be modified to induce horlessness, e.g., in cow (such as described in Carlson D F et al., Nat Biotechnol. 2016; 34:479-81). KISS1R may be modified to induce boretaint (hormone release during sexual maturity leading to undesired meat taste), e.g., in pigs. Dead end protein (dnd) may be modified to induce sterility, e.g., in salmon (such as described in Wargelius A, et al., Sci Rep. 2016; 6:21284). Nano2 and DDX may be modified to induce sterility (e.g., in surrogate hosts), e.g., in pigs and chicken (such as described Park K-E, et al., Sci Rep. 2017; 7:40176; Taylor L et al., Development. 2017; 144:928-34). CD163 may be modified to induce PRRSV resistance, e.g., in pigs (such as described in Whitworth K M, et al., Nat Biotechnol. 2015; 34:20-2). RELA may be modified to induce ASFV resilience, e.g., in pigs (such as described in Lillico S G, et al., Sci Rep. 2016; 6:21645). CD18 may be modified to induce Mannheimia (Pasteurella) haemolytica resilience, e.g., in cows (such as described in Shanthalingam S, et al., roc Natl Acad Sci USA. 2016; 113:13186-90). NRAMP1 may be modified to induce tuberculosis resilience, e.g., in cows (such as described in Gao Y et al., Genome Biol. 2017; 18:13). Endogenous retrovirus genes may be modified or removed for xenotransplantation such as described in Yang L, et al. Science. 2015; 350:1101-4; Niu D et al., Science. 2017; 357:1303-7). Negative regulators of muscle mass (e.g., Myostatin) may be modified (e.g., inactivated) to increase muscle mass, e.g., in dogs (as described in Zou Q et al., J Mol Cell Biol. 2015 December; 7(6):580-3).

[0474] Animals such as pigs with severe combined immunodeficiency (SCID) may generated (e.g., by modifying RAG2) to provide useful models for regenerative medicine, xenotransplantation (discussed also elsewhere herein), and tumor development. Examples of methods and approaches include those described Lee K, et al., Proc Natl Acad Sci USA. 2014 May 20;111(20):7260-5; and Schomberg et al. FASEB Journal, April 2016; 30(1): Suppl 571.1.

[0475] SNPs in the animals may be modified. Examples of methods and approaches include those described Tan W. et al., Proc Natl Acad Sci USA. 2013 Oct. 8; 110(41):16526-31; Mali P, et al., Science. 2013 Feb. 15; 339(6121):823-6.

[0476] Stem cells (e.g., induced pluripotent stem cells) may be modified and differentiated into desired progeny cells, e.g., as described in Heo Y T et al., Stem Cells Dev. 2015 Feb. 1; 24(3):393-402.

[0477] Profile analysis (such as Igenity) may be performed on animals to screen and identify genetic variations related to economic traits. The genetic variations may be modified to introduce or improve the traits, such as carcass composition, carcass quality, maternal and reproductive traits and average daily gain.

### Models of Genetic and Epigenetic Conditions

[0478] A method of the invention may be used to create a plant, an animal or cell that may be used to model and/or study genetic or epigenetic conditions of interest, such as a through a model of mutations of interest or a disease model. As used herein, “disease” refers to a disease, disorder, or indication in a subject. For example, a method of the invention may be used to create an animal or cell that comprises a modification in one or more nucleic acid sequences associated with a disease, or a plant, animal or cell in which the expression of one or more nucleic acid sequences associated with a disease are altered. Such a nucleic acid sequence may encode a disease associated protein sequence or may be a disease associated control sequence. Accordingly, it is understood that in embodiments of the invention, a plant, subject, patient, organism or cell can be a non-human subject, patient, organism or cell. Thus, the invention provides a plant, animal or cell, produced by the present methods, or a progeny thereof. The progeny may be a clone of the produced plant or animal, or may result from sexual reproduction by crossing with other individuals of the same species to introgress further desirable traits into their offspring. The cell may be in vivo or ex vivo in the cases of multicellular organisms, particularly animals or plants. In the instance where the cell is in cultured, a cell line may be established if appropriate culturing conditions are met and preferably if the cell is suitably adapted for this purpose (for instance a stem cell). Bacterial cell lines produced by the invention are also envisaged. Hence, cell lines are also envisaged.

[0479] In some methods, the disease model can be used to study the effects of mutations on the animal or cell and development and/or progression of the disease using measures commonly used in the study of the disease. Alternatively, such a disease model is useful for studying the effect of a pharmaceutically active compound on the disease.

[0480] In some methods, the disease model can be used to assess the efficacy of a potential gene therapy strategy. That is, a disease-associated gene or polynucleotide can be modified such that the disease development and/or progression is inhibited or reduced. In particular, the method comprises modifying a disease-associated gene or polynucleotide such that an altered protein is produced and, as a result, the animal or cell has an altered response. Accordingly, in some methods, a genetically modified animal may be compared with an animal predisposed to development of the disease such that the effect of the gene therapy event may be assessed.

[0481] In another embodiment, this invention provides a method of developing a biologically active agent that modulates a cell signaling event associated with a disease gene. The method comprises contacting a test compound with a cell comprising one or more vectors that drive expression of one or more of components of the system; and detecting a change in a readout that is indicative of a reduction or an augmentation of a cell signaling event associated with, e.g., a mutation in a disease gene contained in the cell.

[0482] A cell model or animal model can be constructed in combination with the method of the invention for screening a cellular function change. Such a model may be used to study the effects of a genome sequence modified by the systems and methods herein on a cellular function of interest. For example, a cellular function model may be used to study the effect of a modified genome sequence on intracellular signaling or extracellular signaling. Alternatively, a cellular function model may be used to study the effects of a modified genome sequence on sensory perception. In some such models, one or more genome sequences associated with a signaling biochemical pathway in the model are modified.

[0483] Several disease models have been specifically investigated. These include de novo autism risk genes CHD8, KATNAL2, and SCN2A; and the syndromic autism (Angelman Syndrome) gene UBE3A. These genes and resulting autism models are of course preferred, but serve to show the broad applicability of the invention across genes and corresponding models. An altered expression of one or more genome sequences associated with a signaling biochemical pathway can be determined by assaying for a difference in the mRNA levels of the corresponding genes between the test model cell and a control cell, when they are contacted with a candidate agent. Alternatively, the differential expression of the sequences associated with a signaling biochemical pathway is determined by detecting a difference in the level of the encoded polypeptide or gene product.

[0484] To assay for an agent-induced alteration in the level of mRNA transcripts or corresponding polynucleotides, nucleic acid contained in a sample is first extracted according to standard methods in the art. For instance, mRNA can be isolated using various lytic enzymes or chemical solutions according to the procedures set forth in Sambrook et al. (1989), or extracted by nucleic-acid-binding resins following the accompanying instructions provided by the manufacturers. The mRNA contained in the extracted nucleic acid sample is then detected by amplification procedures or conventional hybridization assays (e.g. Northern blot analysis) according to methods widely known in the art or based on the methods exemplified herein.

[0485] For purpose of this invention, amplification means any method employing a primer and a polymerase capable of replicating a target sequence with reasonable fidelity. Amplification may be carried out by natural or recombinant DNA polymerases such as TaqGold™, T7 DNA polymerase, Klenow fragment of E. coli DNA polymerase, and reverse transcriptase. A preferred amplification method is PCR. In particular, the isolated RNA can be subjected to a reverse transcription assay that is coupled with a quantitative polymerase chain reaction (RT-PCR) in order to quantify the expression level of a sequence associated with a signaling biochemical pathway.

[0486] Detection of the gene expression level can be conducted in real time in an amplification assay. In one aspect, the amplified products can be directly visualized with fluorescent DNA-binding agents including but not limited to DNA intercalators and DNA groove binders. Because the amount of the intercalators incorporated into the double-stranded DNA molecules is typically proportional to the amount of the amplified DNA products, one can conveniently determine the amount of the amplified products by quantifying the fluorescence of the intercalated dye using conventional optical systems in the art. DNA-binding dye suitable for this application include SYBR green, SYBR blue, DAPI, propidium iodine, Hoeste, SYBR gold, ethidium bromide, acridines, proflavine, acridine orange, acriflavine, fluorcoumanin, ellipticine, daunomycin, chloroquine, distamycin D, chromomycin, homidium, mithramycin, ruthenium polypyridyls, anthramycin, and the like.

[0487] In another aspect, other fluorescent labels such as sequence specific probes can be employed in the amplification reaction to facilitate the detection and quantification of the amplified products. Probe-based quantitative amplification relies on the sequence-specific detection of a desired amplified product. It utilizes fluorescent, target-specific probes (e.g., TaqMant probes) resulting in increased specificity and sensitivity. Methods for performing probe-based quantitative amplification are well established in the art and are taught in U.S. Pat. No. 5,210,015.

[0488] In yet another aspect, conventional hybridization assays using hybridization probes that share sequence homology with sequences associated with a signaling biochemical pathway can be performed. Typically, probes are allowed to form stable complexes with the sequences associated with a signaling biochemical pathway contained within the biological sample derived from the test subject in a hybridization reaction. It will be appreciated by one of skill in the art that where antisense is used as the probe nucleic acid, the target polynucleotides provided in the sample are chosen to be complementary to sequences of the antisense nucleic acids. Conversely, where the nucleotide probe is a sense nucleic acid, the target polynucleotide is selected to be complementary to sequences of the sense nucleic acid.

[0489] Hybridization can be performed under conditions of various stringency. Suitable hybridization conditions for the practice of the present invention are such that the recognition interaction between the probe and sequences associated with a signaling biochemical pathway is both sufficiently specific and sufficiently stable. Conditions that increase the stringency of a hybridization reaction are widely known and published in the art. See, for example, (Sambrook, et al., (1989); Nonradioactive In Situ Hybridization Application Manual, Boehringer Mannheim, second edition). The hybridization assay can be formed using probes immobilized on any solid support, including but are not limited to nitrocellulose, glass, silicon, and a variety of gene arrays. A preferred hybridization assay is conducted on high-density gene chips as described in U.S. Pat. No. 5,445,934.

[0490] For a convenient detection of the probe-target complexes formed during the hybridization assay, the nucleotide probes are conjugated to a detectable label. Detectable labels suitable for use in the present invention include any composition detectable by photochemical, biochemical, spectroscopic, immunochemical, electrical, optical or chemical means. A wide variety of appropriate detectable labels are known in the art, which include fluorescent or chemiluminescent labels, radioactive isotope labels, enzymatic or other ligands. In preferred embodiments, one will likely desire to employ a fluorescent label or an enzyme tag, such as digoxigenin, β-galactosidase, urease, alkaline phosphatase or peroxidase, avidin/biotin complex.

[0491] The detection methods used to detect or quantify the hybridization intensity will typically depend upon the label selected above. For example, radiolabels may be detected using photographic film or a phosphoimager. Fluorescent markers may be detected and quantified using a photodetector to detect emitted light. Enzymatic labels are typically detected by providing the enzyme with a substrate and measuring the reaction product produced by the action of the enzyme on the substrate; and finally colorimetric labels are detected by simply visualizing the colored label.

[0492] An agent-induced change in expression of sequences associated with a signaling biochemical pathway can also be determined by examining the corresponding gene products. Determining the protein level typically involves a) contacting the protein contained in a biological sample with an agent that specifically bind to a protein associated with a signaling biochemical pathway; and (b) identifying any agent:protein complex so formed. In one aspect of this embodiment, the agent that specifically binds a protein associated with a signaling biochemical pathway is an antibody, preferably a monoclonal antibody.

[0493] The reaction is performed by contacting the agent with a sample of the proteins associated with a signaling biochemical pathway derived from the test samples under conditions that will allow a complex to form between the agent and the proteins associated with a signaling biochemical pathway. The formation of the complex can be detected directly or indirectly according to standard procedures in the art. In the direct detection method, the agents are supplied with a detectable label and unreacted agents may be removed from the complex; the amount of remaining label thereby indicating the amount of complex formed. For such method, it is preferable to select labels that remain attached to the agents even during stringent washing conditions. It is preferable that the label does not interfere with the binding reaction. In the alternative, an indirect detection procedure may use an agent that contains a label introduced either chemically or enzymatically. A desirable label generally does not interfere with binding or the stability of the resulting agent:polypeptide complex. However, the label is typically designed to be accessible to an antibody for an effective binding and hence generating a detectable signal.

[0494] A wide variety of labels suitable for detecting protein levels are known in the art. Non-limiting examples include radioisotopes, enzymes, colloidal metals, fluorescent compounds, bioluminescent compounds, and chemiluminescent compounds.

[0495] The amount of agent:polypeptide complexes formed during the binding reaction can be quantified by standard quantitative assays. As illustrated above, the formation of agent:polypeptide complex can be measured directly by the amount of label remained at the site of binding. In an alternative, the protein associated with a signaling biochemical pathway is tested for its ability to compete with a labeled analog for binding sites on the specific agent. In this competitive assay, the amount of label captured is inversely proportional to the amount of protein sequences associated with a signaling biochemical pathway present in a test sample.

[0496] A number of techniques for protein analysis based on the general principles outlined above are available in the art. They include but are not limited to radioimmunoassays, ELISA (enzyme linked immunoradiometric assays), “sandwich” immunoassays, immunoradiometric assays, in situ immunoassays (using e.g., colloidal gold, enzyme or radioisotope labels), western blot analysis, immunoprecipitation assays, immunofluorescent assays, and SDS-PAGE.

[0497] Antibodies that specifically recognize or bind to proteins associated with a signaling biochemical pathway are preferable for conducting the aforementioned protein analyses. Where desired, antibodies that recognize a specific type of post-translational modifications (e.g., signaling biochemical pathway inducible modifications) can be used. Post-translational modifications include but are not limited to glycosylation, lipidation, acetylation, and phosphorylation. These antibodies may be purchased from commercial vendors. For example, anti-phosphotyrosine antibodies that specifically recognize tyrosine-phosphorylated proteins are available from a number of vendors including Invitrogen and Perkin Elmer. Anti-phosphotyrosine antibodies are particularly useful in detecting proteins that are differentially phosphorylated on their tyrosine residues in response to an ER stress. Such proteins include but are not limited to eukaryotic translation initiation factor 2 alpha (eIF-211). Alternatively, these antibodies can be generated using conventional polyclonal or monoclonal antibody technologies by immunizing a host animal or an antibody-producing cell with a target protein that exhibits the desired post-translational modification.

[0498] In practicing the subject method, it may be desirable to discern the expression pattern of an protein associated with a signaling biochemical pathway in different bodily tissue, in different cell types, and/or in different subcellular structures. These studies can be performed with the use of tissue-specific, cell-specific or subcellular structure specific antibodies capable of binding to protein markers that are preferentially expressed in certain tissues, cell types, or subcellular structures.

[0499] An altered expression of a gene associated with a signaling biochemical pathway can also be determined by examining a change in activity of the gene product relative to a control cell. The assay for an agent-induced change in the activity of a protein associated with a signaling biochemical pathway will be dependent on the biological activity and/or the signal transduction pathway that is under investigation. For example, where the protein is a kinase, a change in its ability to phosphorylate the downstream substrate(s) can be determined by a variety of assays known in the art. Representative assays include but are not limited to immunoblotting and immunoprecipitation with antibodies such as anti-phosphotyrosine antibodies that recognize phosphorylated proteins. In addition, kinase activity can be detected by high throughput chemiluminescent assays such as AlphaScreen™ (available from Perkin Elmer) and eTag™ assay (Chan-Hui, et al. (2003) Clinical Immunology 111: 162-174).

[0500] Where the protein associated with a signaling biochemical pathway is part of a signaling cascade leading to a fluctuation of intracellular pH condition, pH sensitive molecules such as fluorescent pH dyes can be used as the reporter molecules. In another example where the protein associated with a signaling biochemical pathway is an ion channel, fluctuations in membrane potential and/or intracellular ion concentration can be monitored. A number of commercial kits and high-throughput devices are particularly suited for a rapid and robust screening for modulators of ion channels. Representative instruments include FLIPRTM (Molecular Devices, Inc.) and VIPR (Aurora Biosciences). These instruments are capable of detecting reactions in over 1000 sample wells of a microplate simultaneously, and providing real-time measurement and functional data within a second or even a millisecond.

[0501] In practicing any of the methods disclosed herein, a suitable vector can be introduced to a cell or an embryo via one or more methods known in the art, including without limitation, microinjection, electroporation, sonoporation, biolistics, calcium phosphate-mediated transfection, cationic transfection, liposome transfection, dendrimer transfection, heat shock transfection, nucleofection transfection, magnetofection, lipofection, impalefection, optical transfection, proprietary agent-enhanced uptake of nucleic acids, and delivery via liposomes, immunoliposomes, virosomes, or artificial virions. In some methods, the vector is introduced into an embryo by microinjection. The vector or vectors may be microinjected into the nucleus or the cytoplasm of the embryo. In some methods, the vector or vectors may be introduced into a cell by nucleofection.

[0502] The target polynucleotide of a CRISPR complex can be any polynucleotide endogenous or exogenous to the eukaryotic cell. For example, the target polynucleotide can be a polynucleotide residing in the nucleus of the eukaryotic cell. The target polynucleotide can be a sequence coding a gene product (e.g., a protein) or a non-coding sequence (e.g., a regulatory polynucleotide or a junk DNA).

[0503] Examples of target polynucleotides include a sequence associated with a signaling biochemical pathway, e.g., a signaling biochemical pathway-associated gene or polynucleotide. Examples of target polynucleotides include a disease associated gene or polynucleotide. A “disease-associated” gene or polynucleotide refers to any gene or polynucleotide which is yielding transcription or translation products at an abnormal level or in an abnormal form in cells derived from a disease-affected tissues compared with tissues or cells of a non-disease control. It may be a gene that becomes expressed at an abnormally high level; it may be a gene that becomes expressed at an abnormally low level, where the altered expression correlates with the occurrence and/or progression of the disease. A disease-associated gene also refers to a gene possessing mutation(s) or genetic variation that is directly responsible or is in linkage disequilibrium with a gene(s) that is responsible for the etiology of a disease. The transcribed or translated products may be known or unknown, and may be at a normal or abnormal level.

[0504] The target polynucleotide of the system herein can be any polynucleotide endogenous or exogenous to the eukaryotic cell. For example, the target polynucleotide can be a polynucleotide residing in the nucleus of the eukaryotic cell. The target polynucleotide can be a sequence coding a gene product (e.g., a protein) or a non-coding sequence (e.g., a regulatory polynucleotide or a junk DNA). Without wishing to be bound by theory, it is believed that the target sequence should be associated with a PAM (protospacer adjacent motif); that is, a short sequence recognized by the CRISPR complex. The precise sequence and length requirements for the PAM differ depending on the CRISPR enzyme used, but PAMs are typically 2-5 base pair sequences adjacent the protospacer (that is, the target sequence) Examples of PAM sequences are given in the examples section below, and the skilled person will be able to identify further PAM sequences for use with a given CRISPR enzyme. Further, engineering of the PAM Interacting (PI) domain may allow programing of PAM specificity, improve target site recognition fidelity, and increase the versatility of the Cas, e.g. Cas9, genome engineering platform. Cas proteins, such as Cas9 proteins may be engineered to alter their PAM specificity, for example as described in Kleinstiver B P et al. Engineered CRISPR-Cas9 nucleases with altered PAM specificities. Nature. 2015 Jul. 23; 523 (7561):481-5. Doi: 10.1038/nature14592.

[0505] The target polynucleotide of the system may include a number of disease-associated genes and polynucleotides as well as signaling biochemical pathway-associated genes and polynucleotides as listed in U.S. provisional patent applications 61/736,527 and 61/748,427 having Broad reference BI-2011/008/WSGR Docket No. 44063-701.101 and BI-2011/008/WSGR Docket No. 44063-701.102 respectively, both entitled SYSTEMS METHODS AND COMPOSITIONS FOR SEQUENCE MANIPULATION filed on Dec. 12, 2012 and Jan. 2, 2013, respectively, and PCT Application PCT/US2013/074667, entitled DELIVERY, ENGINEERING AND OPTIMIZATION OF SYSTEMS, METHODS AND COMPOSITIONS FOR SEQUENCE MANIPULATION AND THERAPEUTIC APPLICATIONS, filed Dec. 12, 2013, the contents of all of which are herein incorporated by reference in their entirety.

[0506] Examples of target polynucleotides include a sequence associated with a signaling biochemical pathway, e.g., a signaling biochemical pathway-associated gene or polynucleotide. Examples of target polynucleotides include a disease associated gene or polynucleotide. A “disease-associated” gene or polynucleotide refers to any gene or polynucleotide which is yielding transcription or translation products at an abnormal level or in an abnormal form in cells derived from a disease-affected tissues compared with tissues or cells of a non-disease control. It may be a gene that becomes expressed at an abnormally high level; it may be a gene that becomes expressed at an abnormally low level, where the altered expression correlates with the occurrence and/or progression of the disease. A disease-associated gene also refers to a gene possessing mutation(s) or genetic variation that is directly responsible or is in linkage disequilibrium with a gene(s) that is responsible for the etiology of a disease. The transcribed or translated products may be known or unknown, and may be at a normal or abnormal level.

### Therapeutic Applications

[0507] Also provided herein are methods of diagnosing, prognosing, treating, and/or preventing a disease, state, or condition in or of a subject. Generally, the methods of diagnosing, prognosing, treating, and/or preventing a disease, state, or condition in or of a subject can include modifying a polynucleotide in a subject or cell thereof using a composition, system, or component thereof described herein and/or include detecting a diseased or healthy polynucleotide in a subject or cell thereof using a composition, system, or component thereof described herein. In one example embodiment, the method of treatment or prevention can include using a composition, system, or component thereof to modify a polynucleotide of an infectious organism (e.g. bacterial or virus) within a subject or cell thereof. In one example embodiment, the method of treatment or prevention can include using a composition, system, or component thereof to modify a polynucleotide of an infectious organism or symbiotic organism within a subject. The composition, system, and components thereof can be used to develop models of diseases, states, or conditions. The composition, system, and components thereof can be used to detect a disease state or correction thereof, such as by a method of treatment or prevention described herein. The composition, system, and components thereof can be used to screen and select cells that can be used, for example, as treatments or preventions described herein. The composition, system, and components thereof can be used to develop biologically active agents that can be used to modify one or more biologic functions or activities in a subject or a cell thereof.

[0508] In general, the method can include delivering a composition, system, and/or component thereof to a subject or cell thereof, or to an infectious or symbiotic organism by a suitable delivery technique and/or composition. Once administered the components can operate as described elsewhere herein to elicit a nucleic acid modification event. In some aspects, the nucleic acid modification event can occur at the genomic, epigenomic, and/or transcriptomic level. DNA and/or RNA cleavage, gene activation, and/or gene deactivation can occur. Additional features, uses, and advantages are described in greater detail below. On the basis of this concept, several variations are appropriate to elicit a genomic locus event, including DNA cleavage, gene activation, or gene deactivation. Using the provided compositions, the person skilled in the art can advantageously and specifically target single or multiple loci with the same or different functional domains to elicit one or more genomic locus events. In addition to treating and/or preventing a disease in a subject, the compositions may be applied in a wide variety of methods for screening in libraries in cells and functional modeling in vivo (e.g. gene activation of lincRNA and identification of function; gain-of-function modeling; loss-of-function modeling; the use the compositions of the invention to establish cell lines and transgenic animals for optimization and screening purposes).

[0509] The composition, system, and components thereof described elsewhere herein can be used to treat and/or prevent a disease, such as a genetic and/or epigenetic disease, in a subject. The composition, system, and components thereof described elsewhere herein can be used to treat and/or prevent genetic infectious diseases in a subject, such as bacterial infections, viral infections, fungal infections, parasite infections, and combinations thereof. The composition, system, and components thereof described elsewhere herein can be used to modify the composition or profile of a microbiome in a subject, which can in turn modify the health status of the subject. The composition, system, described herein can be used to modify cells ex vivo, which can then be administered to the subject whereby the modified cells can treat or prevent a disease or symptom thereof. This is also referred to in some contexts as adoptive therapy. The composition, system, described herein can be used to treat mitochondrial diseases, where the mitochondrial disease etiology involves a mutation in the mitochondrial DNA.

[0510] Also provided is a method of treating a subject, e.g., a subject in need thereof, comprising inducing gene editing by transforming the subject with the polynucleotide encoding one or more components of the composition, system, or complex or any of polynucleotides or vectors described herein and administering them to the subject. A suitable repair template may also be provided, for example delivered by a vector comprising said repair template. Also provided is a method of treating a subject, e.g., a subject in need thereof, comprising inducing transcriptional activation or repression of multiple target gene loci by transforming the subject with the polynucleotides or vectors described herein, wherein said polynucleotide or vector encodes or comprises one or more components of composition, system, complex or component thereof comprising multiple Cas effectors. Where any treatment is occurring ex vivo, for example in a cell culture, then it will be appreciated that the term ‘subject’ may be replaced by the phrase “cell or cell culture.”

[0511] Also provided is a method of treating a subject, e.g., a subject in need thereof, comprising inducing gene editing by transforming the subject with the Cas effector(s), advantageously encoding and expressing in vivo the remaining portions of the composition, system, (e.g., RNA, guides). A suitable repair template may also be provided, for example delivered by a vector comprising said repair template. Also provided is a method of treating a subject, e.g., a subject in need thereof, comprising inducing transcriptional activation or repression by transforming the subject with the Cas effector(s) advantageously encoding and expressing in vivo the remaining portions of the composition, system, (e.g., RNA, guides); advantageously in one example embodiment the CRISPR enzyme is a catalytically inactive Cas effector and includes one or more associated functional domains. Where any treatment is occurring ex vivo, for example in a cell culture, then it will be appreciated that the term ‘subject’ may be replaced by the phrase “cell or cell culture.”

[0512] One or more components of the composition and system described herein can be included in a composition, such as a pharmaceutical composition, and administered to a host individually or collectively. Alternatively, these components may be provided in a single composition for administration to a host. Administration to a host may be performed via viral vectors known to the skilled person or described herein for delivery to a host (e.g. lentiviral vector, adenoviral vector, AAV vector). As explained herein, use of different selection markers (e.g. for lentiviral gRNA selection) and concentration of gRNA (e.g. dependent on whether multiple gRNAs are used) may be advantageous for eliciting an improved effect.

[0513] Thus, also described herein are methods of inducing one or more polynucleotide modifications in a eukaryotic or prokaryotic cell or component thereof (e.g. a mitochondria) of a subject, infectious organism, and/or organism of the microbiome of the subject. The modification can include the introduction, deletion, or substitution of one or more nucleotides at a target sequence of a polynucleotide of one or more cell(s). The modification can occur in vitro, ex vivo, in situ, or in vivo.

[0514] In one example embodiment, the method of treating or inhibiting a condition or a disease caused by one or more mutations in a genomic locus in a eukaryotic organism or a non-human organism can include manipulation of a target sequence within a coding, non-coding or regulatory element of said genomic locus in a target sequence in a subject or a non-human subject in need thereof comprising modifying the subject or a non-human subject by manipulation of the target sequence and wherein the condition or disease is susceptible to treatment or inhibition by manipulation of the target sequence including providing treatment comprising delivering a composition comprising the particle delivery system or the delivery system or the virus particle of any one of the above embodiment or the cell of any one of the above embodiment.

[0515] Also provided herein is the use of the particle delivery system or the delivery system or the virus particle of any one of the above embodiment or the cell of any one of the above embodiment in ex vivo or in vivo gene or genome editing; or for use in in vitro, ex vivo or in vivo gene therapy. Also provided herein are particle delivery systems, non-viral delivery systems, and/or the virus particle of any one of the above embodiments or the cell of any one of the above embodiments used in the manufacture of a medicament for in vitro, ex vivo or in vivo gene or genome editing or for use in in vitro, ex vivo or in vivo gene therapy or for use in a method of modifying an organism or a non-human organism by manipulation of a target sequence in a genomic locus associated with a disease or in a method of treating or inhibiting a condition or disease caused by one or more mutations in a genomic locus in a eukaryotic organism or a non-human organism.

[0516] In one example embodiment, polynucleotide modification can include the introduction, deletion, or substitution of 1-75 nucleotides at each target sequence of said polynucleotide of said cell(s). The modification can include the introduction, deletion, or substitution of at least 1, 5, 10, 11, 12, 13, 14, 15, 16, 17, 18, 19, 20, 21, 22, 23, 24, 25, 26, 27, 28, 29, 30, 35, 40, 45, 50, or 75 nucleotides at each target sequence. The modification can include the introduction, deletion, or substitution of at least 5, 10, 11, 12, 13, 14, 15, 16, 17, 18, 19, 20, 21, 22, 23, 24, 25, 26, 27, 28, 29, 30, 35, 40, 45, 50, or 75 nucleotides at each target sequence of said cell(s). The modification can include the introduction, deletion, or substitution of at least 10, 11, 12, 13, 14, 15, 16, 17, 18, 19, 20, 21, 22, 23, 24, 25, 26, 27, 28, 29, 30, 35, 40, 45, 50, or 75 nucleotides at each target sequence of said cell(s). The modification can include the introduction, deletion, or substitution of at least 20, 21, 22, 23, 24, 25, 26, 27, 28, 29, 30, 35, 40, 45, 50, or 75 nucleotides at each target sequence of said cell(s). The modification can include the introduction, deletion, or substitution of at least 40, 45, 50, 75, 100, 200, 300, 400 or 500 nucleotides at each target sequence of said cell(s). The modification can include the introduction, deletion, or substitution of at least 500, 600, 700, 800, 900, 1000, 1100, 1200, 1300, 1400, 1500, 1600, 1700, 1800, 1900, 2000, 2100, 2200, 2300, 2400, 2500, 2600, 2700, 2800, 2900, 3000, 3100, 3200, 3300, 3400, 3500, 3600, 3700, 3800, 3900, 4000, 4100, 4200, 4300, 4400, 4500, 4600, 4700, 4800, 4900, 5000, 5100, 5200, 5300, 5400, 5500, 5600, 5700, 5800, 5900, 6000, 6100, 6200, 6300, 6400, 6500, 6600, 6700, 6800, 6900, 7000, 7100, 7200, 7300, 7400, 7500, 7600, 7700, 7800, 7900, 8000, 8100, 8200, 8300, 8400, 8500, 8600, 8700, 8800, 8900, 9000, 9100, 9200, 9300, 9400, 9500, 9600, 9700, 9800, or 9900 to 10000 nucleotides at each target sequence of said cell(s).

[0517] In one example embodiment, the modifications can include the introduction, deletion, or substitution of nucleotides at each target sequence of said cell(s) via nucleic acid components (e.g. guide(s) RNA(s) or sgRNA(s)), such as those mediated by a composition, system, or a component thereof described elsewhere herein. In one example embodiment, the modifications can include the introduction, deletion, or substitution of nucleotides at a target or random sequence of said cell(s) via a composition, system, or technique.

[0518] The target sequences of polynucleotides to be modified to treat or prevent disease are described in greater detail below.

[0519] As is also discussed elsewhere herein, the composition, system, can include a template polynucleotide (also referred to herein as template nucleic acids or template sequence). In an embodiment, the template nucleic acid alters the structure of the target position by participating in homologous recombination. In an embodiment, the template nucleic acid alters the sequence of the target position. In an embodiment, the template nucleic acid results in the incorporation of a modified, or non-naturally occurring base into the target nucleic acid.

[0520] The template sequence may undergo a breakage mediated or catalyzed recombination with the target sequence. In an embodiment, the template nucleic acid can include sequence that corresponds to a site on the target sequence that is cleaved, nicked, or otherwise modified by one or more Cas effector mediated cleavage event(s). In an embodiment, the template nucleic acid can include sequence that corresponds to both, a first site on the target sequence that is cleaved, nicked, or otherwise modified in a first Cas effector mediated event, and a second site on the target sequence that is cleaved in a second Cas effector mediated event.

[0521] In certain embodiments, the template nucleic acid can include a sequence which results in an alteration in the coding sequence of a translated sequence, e.g., one which results in the substitution of one amino acid for another in a protein product, e.g., transforming a mutant allele into a wild type allele, transforming a wild type allele into a mutant allele, and/or introducing a stop codon, insertion of an amino acid residue, deletion of an amino acid residue, or a nonsense mutation. In certain embodiments, the template nucleic acid can include sequence which results in an alteration in a non-coding sequence, e.g., an alteration in an exon or in a 5′ or 3′ non-translated or non-transcribed region. Such alterations include an alteration in a control element, e.g., a promoter, enhancer, and an alteration in a cis-acting or trans-acting control element.

[0522] A template nucleic acid having homology with a target position in a target gene may be used to alter the structure of a target sequence. The template sequence may be used to alter an unwanted structure, e.g., an unwanted or mutant nucleotide. The template nucleic acid may include sequence which, when integrated, results in: decreasing the activity of a positive control element; increasing the activity of a positive control element; decreasing the activity of a negative control element; increasing the activity of a negative control element; decreasing the expression of a gene; increasing the expression of a gene; increasing resistance to a disorder or disease; increasing resistance to viral entry; correcting a mutation or altering an unwanted amino acid residue conferring, increasing, abolishing or decreasing a biological property of a gene product, e.g., increasing the enzymatic activity of an enzyme, or increasing the ability of a gene product to interact with another molecule.

[0523] The template nucleic acid may include sequence which results in: a change in sequence of 1, 2, 3, 4, 5, 6, 7, 8, 9, 10, 11, 12 or more nucleotides of the target sequence. In an embodiment, the template nucleic acid may be 20+/−10, 30+/−10, 40+/−10, 50+/−10, 60+/−10, 70+/−10, 80+/−10, 9 0+/−10, 100+/−10, 110+/−10, 120+/−10, 130+/−10, 140+/−10, 150+/−10, 160+/−10, 170+/−10, 1 80+/−10, 190+/−10, 200+/−10, 210+/−10, of 220+/−10 nucleotides in length. In an embodiment, the template nucleic acid may be 30+/−20, 40+/−20, 50+/−20, 60+/−20, 70+/−20, 80+/−20, 90+/−20, 100+/−20, 110+/−20, 120+/−20, 130+/−20, 140+/−20, 150+/−20, 160+/−20, 170+/−20, 180+/−20, 190+/−20, 200+/−20, 210+/−20, of 220+/−20 nucleotides in length. In an embodiment, the template nucleic acid is 10 to 1,000, 20 to 900, 30 to 800, 40 to 700, 50 to 600, 50 to 500, 50 to 400, 50 to 300, 50 to 200, or 50 to 100 nucleotides in length.

[0524] A template nucleic acid comprises the following components: [5′ homology arm]-[replacement sequence]-[3′ homology arm]. The homology arms provide for recombination into the chromosome, thus replacing the undesired element, e.g., a mutation or signature, with the replacement sequence. In an embodiment, the homology arms flank the most distal cleavage sites. In an embodiment, the 3′ end of the 5′ homology arm is the position next to the 5′ end of the replacement sequence. In an embodiment, the 5′ homology arm can extend at least 10, 20, 30, 40, 50, 100, 200, 300, 400, 500, 600, 700, 800, 900, 1000, 1500, or 2000 nucleotides 5′ from the 5′ end of the replacement sequence. In an embodiment, the 5′ end of the 3′ homology arm is the position next to the 3′ end of the replacement sequence. In an embodiment, the 3′ homology arm can extend at least 10, 20, 30, 40, 50, 100, 200, 300, 400, 500, 600, 700, 800, 900, 1000, 1500, or 2000 nucleotides 3′ from the 3′ end of the replacement sequence.

[0525] In certain embodiments, one or both homology arms may be shortened to avoid including certain sequence repeat elements. For example, a 5′ homology arm may be shortened to avoid a sequence repeat element. In other embodiments, a 3′ homology arm may be shortened to avoid a sequence repeat element. In one example embodiment, both the 5′ and the 3′ homology arms may be shortened to avoid including certain sequence repeat elements.

[0526] In certain embodiments, a template nucleic acids for correcting a mutation may designed for use as a single-stranded oligonucleotide. When using a single-stranded oligonucleotide, 5′ and 3′ homology arms may range up to about 200 base pairs (bp) in length, e.g., at least 25, 50, 75, 100, 125, 150, 175, or 200 bp in length.

[0527] In one example embodiment, the composition, system, or component thereof can promote Non-Homologous End-Joining (NHEJ). In one example embodiment, modification of a polynucleotide by a composition, system, or a component thereof, such as a diseased polynucleotide, can include NHEJ. In one example embodiment, promotion of this repair pathway by the composition, system, or a component thereof can be used to target gene or polynucleotide specific knock-outs and/or knock-ins. In one example embodiment, promotion of this repair pathway by the composition, system, or a component thereof can be used to generate NHEJ-mediated indels. Nuclease-induced NHEJ can also be used to remove (e.g., delete) sequence in a gene of interest. Generally, NHEJ repairs a double-strand break in the DNA by joining together the two ends; however, generally, the original sequence is restored only if two compatible ends, exactly as they were formed by the double-strand break, are perfectly ligated. The DNA ends of the double-strand break are frequently the subject of enzymatic processing, resulting in the addition or removal of nucleotides, at one or both strands, prior to rejoining of the ends. This results in the presence of insertion and/or deletion (indel) mutations in the DNA sequence at the site of the NHEJ repair. The indel can range in size from 1-50 or more base pairs. In one example embodiment the indel can be 1, 2, 3, 4, 5, 6, 7, 8, 9, 10, 11, 12, 13, 14, 15, 16, 17, 18, 19, 20, 21, 22, 23, 24, 25, 26, 27, 28, 29, 30, 31, 32, 33, 34, 35, 36, 37, 38, 39, 40, 41, 42, 43, 44, 45, 46, 47, 48, 49, 50, 51, 52, 53, 54, 55, 56, 57, 58, 59, 60, 61, 62, 63, 64, 65, 66, 67, 68, 69, 70, 71, 72, 73, 74, 75, 76, 77, 78, 79, 80, 81, 82, 83, 84, 85, 86, 87, 88, 89, 90, 91, 92, 93, 94, 95, 96, 97, 98, 99, 100, 101, 102, 103, 104, 105, 106, 107, 108, 109, 110, 111, 112, 113, 114, 115, 116, 117, 118, 119, 120, 121, 122, 123, 124, 125, 126, 127, 128, 129, 130, 131, 132, 133, 134, 135, 136, 137, 138, 139, 140, 141, 142, 143, 144, 145, 146, 147, 148, 149, 150, 151, 152, 153, 154, 155, 156, 157, 158, 159, 160, 161, 162, 163, 164, 165, 166, 167, 168, 169, 170, 171, 172, 173, 174, 175, 176, 177, 178, 179, 180, 181, 182, 183, 184, 185, 186, 187, 188, 189, 190, 191, 192, 193, 194, 195, 196, 197, 198, 199, 200, 201, 202, 203, 204, 205, 206, 207, 208, 209, 210, 211, 212, 213, 214, 215, 216, 217, 218, 219, 220, 221, 222, 223, 224, 225, 226, 227, 228, 229, 230, 231, 232, 233, 234, 235, 236, 237, 238, 239, 240, 241, 242, 243, 244, 245, 246, 247, 248, 249, 250, 251, 252, 253, 254, 255, 256, 257, 258, 259, 260, 261, 262, 263, 264, 265, 266, 267, 268, 269, 270, 271, 272, 273, 274, 275, 276, 277, 278, 279, 280, 281, 282, 283, 284, 285, 286, 287, 288, 289, 290, 291, 292, 293, 294, 295, 296, 297, 298, 299, 300, 301, 302, 303, 304, 305, 306, 307, 308, 309, 310, 311, 312, 313, 314, 315, 316, 317, 318, 319, 320, 321, 322, 323, 324, 325, 326, 327, 328, 329, 330, 331, 332, 333, 334, 335, 336, 337, 338, 339, 340, 341, 342, 343, 344, 345, 346, 347, 348, 349, 350, 351, 352, 353, 354, 355, 356, 357, 358, 359, 360, 361, 362, 363, 364, 365, 366, 367, 368, 369, 370, 371, 372, 373, 374, 375, 376, 377, 378, 379, 380, 381, 382, 383, 384, 385, 386, 387, 388, 389, 390, 391, 392, 393, 394, 395, 396, 397, 398, 399, 400, 401, 402, 403, 404, 405, 406, 407, 408, 409, 410, 411, 412, 413, 414, 415, 416, 417, 418, 419, 420, 421, 422, 423, 424, 425, 426, 427, 428, 429, 430, 431, 432, 433, 434, 435, 436, 437, 438, 439, 440, 441, 442, 443, 444, 445, 446, 447, 448, 449, 450, 451, 452, 453, 454, 455, 456, 457, 458, 459, 460, 461, 462, 463, 464, 465, 466, 467, 468, 469, 470, 471, 472, 473, 474, 475, 476, 477, 478, 479, 480, 481, 482, 483, 484, 485, 486, 487, 488, 489, 490, 491, 492, 493, 494, 495, 496, 497, 498, 499, or 500 base pairs or more. If a double-strand break is targeted near to a short target sequence, the deletion mutations caused by the NHEJ repair often span, and therefore remove, the unwanted nucleotides. For the deletion of larger DNA segments, introducing two double-strand breaks, one on each side of the sequence, can result in NHEJ between the ends with removal of the entire intervening sequence. Both of these approaches can be used to delete specific DNA sequences.

[0528] In one example embodiment, composition, system, mediated NHEJ can be used in the method to delete small sequence motifs. In one example embodiment, composition, system, mediated NHEJ can be used in the method to generate NHEJ-mediate indels that can be targeted to the gene, e.g., a coding region, e.g., an early coding region of a gene of interest can be used to knockout (i.e., eliminate expression of) a gene of interest. For example, early coding region of a gene of interest includes sequence immediately following a transcription start site, within a first exon of the coding sequence, or within 500 bp of the transcription start site (e.g., less than 500, 450, 400, 350, 300, 250, 200, 150, 100 or 50 bp). In an embodiment, in which a guide RNA and Cas effector generate a double strand break for the purpose of inducing NHEJ-mediated indels, a guide RNA may be configured to position one double-strand break in close proximity to a nucleotide of the target position. In an embodiment, the cleavage site may be between 0-500 bp away from the target position (e.g., less than 500, 400, 300, 200, 100, 50, 40, 30, 25, 20, 15, 10, 9, 8, 7, 6, 5, 4, 3, 2 or 1 bp from the target position). In an embodiment, in which two guide RNAs complexing with one or more Cas nickases induce two single strand breaks for the purpose of inducing NHEJ-mediated indels, two guide RNAs may be configured to position two single-strand breaks to provide for NHEJ repair a nucleotide of the target position.

[0529] For minimization of toxicity and off-target effect, it may be important to control the concentration of Cas mRNA and guide RNA delivered. Optimal concentrations of Cas mRNA and guide RNA can be determined by testing different concentrations in a cellular or non-human eukaryote animal model and using deep sequencing the analyze the extent of modification at potential off-target genomic loci. Alternatively, to minimize the level of toxicity and off-target effect, Cas nickase mRNA (for example S. pyogenes Cas9 with the D10A mutation) can be delivered with a pair of guide RNAs targeting a site of interest. Guide sequences and strategies to minimize toxicity and off-target effects can be as in WO 2014/093622 (PCT/US2013/074667); or, via mutation. Others are as described elsewhere herein.

[0530] Typically, in the context of an endogenous CRISPR or CAST system, formation of a CRISPR or CAST complex (comprising a guide sequence hybridized to a target sequence and complexed with one or more Cas proteins) results in cleavage, nicking, and/or another modification of one or both strands in or near (e.g. within 1, 2, 3, 4, 5, 6, 7, 8, 9, 10, 20, 50, or more base pairs from) the target sequence. In one example embodiment, the tracr sequence, which may comprise or consist of all or a portion of a wild-type tracr sequence (e.g. about or more than about 20, 26, 32, 45, 48, 54, 63, 67, 85, or more nucleotides of a wild-type tracr sequence), can also form part of a CRISPR complex, such as by hybridization along at least a portion of the tracr sequence to all or a portion of a tracr mate sequence that is operably linked to the guide sequence.

[0531] In one example embodiment, a method of modifying a target polynucleotide in a cell to treat or prevent a disease can include allowing a composition, system, or component thereof to bind to the target polynucleotide, e.g., to effect cleavage, nicking, or other modification as the composition, system, is capable of said target polynucleotide, thereby modifying the target polynucleotide, wherein the composition, system, or component thereof, complex with a guide sequence, and hybridize said guide sequence to a target sequence within the target polynucleotide, wherein said guide sequence is optionally linked to a tracr mate sequence, which in turn can hybridize to a tracr sequence. In some of these embodiments, the composition, system, or component thereof can be or include a CRISPR-Cas effector complexed with a guide sequence. In one example embodiment, modification can include cleaving or nicking one or two strands at the location of the target sequence by one or more components of the composition, system, or component thereof.

[0532] The cleavage, nicking, or other modification capable of being performed by the composition, system, can modify transcription of a target polynucleotide. In one example embodiment, modification of transcription can include decreasing transcription of a target polynucleotide. In one example embodiment, modification can include increasing transcription of a target polynucleotide. In one example embodiment, the method includes repairing said cleaved target polynucleotide by homologous recombination with an exogenous template polynucleotide, wherein said repair results in a modification such as, but not limited to, an insertion, deletion, or substitution of one or more nucleotides of said target polynucleotide. In one example embodiment, said modification results in one or more amino acid changes in a protein expressed from a gene comprising the target sequence. In one example embodiment, the modification imparted by the composition, system, or component thereof provides a transcript and/or protein that can correct a disease or a symptom thereof, including but not limited to, any of those described in greater detail elsewhere herein.

[0533] In one example embodiment, the method of treating or preventing a disease can include delivering one or more vectors or vector systems to a cell, such as a eukaryotic or prokaryotic cell, wherein one or more vectors or vector systems include the composition, system, or component thereof. In one example embodiment, the vector(s) or vector system(s) can be a viral vector or vector system, such as an AAV or lentiviral vector system, which are described in greater detail elsewhere herein. In one example embodiment, the method of treating or preventing a disease can include delivering one or more viral particles, such as an AAV or lentiviral particle, containing the composition, system, or component thereof. In one example embodiment, the viral particle has a tissue specific tropism. In one example embodiment, the viral particle has a liver, muscle, eye, heart, pancreas, kidney, neuron, epithelial cell, endothelial cell, astrocyte, glial cell, immune cell, or red blood cell specific tropism.

[0534] It will be understood that the composition, system, according to the invention as described herein, such as the composition, system, for use in the methods according to the invention as described herein, may be suitably used for any type of application known for composition, system, preferably in eukaryotes. In certain aspects, the application is therapeutic, preferably therapeutic in a eukaryote organism, such as including but not limited to animals (including human), plants, algae, fungi (including yeasts), etc. Alternatively, or in addition, in certain aspects, the application may involve accomplishing or inducing one or more particular traits or characteristics, such as genotypic and/or phenotypic traits or characteristics, as also described elsewhere herein.

### Treating Diseases of the Circulatory System

[0535] In one example embodiment, the composition, system, and/or component thereof described herein can be used to treat and/or prevent a circulatory system disease. Exemplary disease is provided, for example, in Tables 9 and 10. In one example embodiment the plasma exosomes of Wahlgren et al. (Nucleic Acids Research, 2012, Vol. 40, No. 17 e130) can be used to deliver the composition, system, and/or component thereof described herein to the blood. In one example embodiment, the circulatory system disease can be treated by using a lentivirus to deliver the composition, system, described herein to modify hematopoietic stem cells (HSCs) in vivo or ex vivo (see e.g. Drakopoulou, “Review Article, The Ongoing Challenge of Hematopoietic Stem Cell-Based Gene Therapy for 13-Thalassemia,” Stem Cells International, Volume 2011, Article ID 987980, 10 pages, doi:10.4061/2011/987980, which can be adapted for use with the composition, system, herein in view of the description herein). In one example embodiment, the circulatory system disorder can be treated by correcting HSCs as to the disease using a composition, system, herein or a component thereof, wherein the composition, system, optionally includes a suitable HDR repair template (see e.g. Cavazzana, “Outcomes of Gene Therapy for β-Thalassemia Major via Transplantation of Autologous Hematopoietic Stem Cells Transduced Ex Vivo with a Lentiviral (3A-T87Q-Globin Vector.”; Cavazzana-Calvo, “Transfusion independence and HMGA2 activation after gene therapy of human β-thalassaemia”, Nature 467, 318-322 (16 Sep. 2010) doi:10.1038/nature09328; Nienhuis, “Development of Gene Therapy for Thalassemia, Cold Spring Harbor Perspectives in Medicine, doi: 10.1101/cshperspect.a011833 (2012), LentiGlobin BB305, a lentiviral vector containing an engineered β-globin gene ((3A-T87Q); and Xie et al., “Seamless gene correction of β-thalassaemia mutations in patient-specific iPSCs using CRISPR/Cas9 and piggyback” Genome Research gr.173427.114 (2014) http://www.genome.org/cgi/doi/10.1101/gr.173427.114 (Cold Spring Harbor Laboratory Press; Watts, “Hematopoietic Stem Cell Expansion and Gene Therapy” Cytotherapy 13(10):1164-1171. Doi:10.3109/14653249.2011.620748 (2011), which can be adapted for use with the composition, system, herein in view of the description herein). In one example embodiment, iPSCs can be modified using a composition, system, described herein to correct a disease polynucleotide associated with a circulatory disease. In this regard, the teachings of Xu et al. (Sci Rep. 2015 Jul. 9; 5:12065. Doi: 10.1038/srep12065) and Song et al. (Stem Cells Dev. 2015 May 1;24(9):1053-65. Doi: 10.1089/scd.2014.0347. Epub 2015 Feb. 5) with respect to modifying iPSCs can be adapted for use in view of the description herein with the composition, system, described herein.

[0536] The term “Hematopoietic Stem Cell” or “HSC” refers broadly those cells considered to be an HSC, e.g., blood cells that give rise to all the other blood cells and are derived from mesoderm; located in the red bone marrow, which is contained in the core of most bones. HSCs of the invention include cells having a phenotype of hematopoietic stem cells, identified by small size, lack of lineage (lin) markers, and markers that belong to the cluster of differentiation series, like: CD34, CD38, CD90, CD133, CD105, CD45, and also c-kit,- the receptor for stem cell factor. Hematopoietic stem cells are negative for the markers that are used for detection of lineage commitment, and are, thus, called Lin-; and, during their purification by FACS, a number of up to 14 different mature blood-lineage markers, e.g., CD13 & CD33 for myeloid, CD71 for erythroid, CD19 for B cells, CD61 for megakaryocytic, etc. for humans; and, B220 (murine CD45) for B cells, Mac-1 (CD11b/CD18) for monocytes, Gr-1 for Granulocytes, Ter119 for erythroid cells, Il7Ra, CD3, CD4, CD5, CD8 for T cells, etc. Mouse HSC markers: CD341o/-, SCA-1+, Thy1.1+/lo, CD38+, C-kit+, lin-, and Human HSC markers: CD34+, CD59+, Thy 1/CD90+, CD381o/-, C-kit/CD117+, and lin-. HSCs are identified by markers. Hence in embodiments discussed herein, the HSCs can be CD34+ cells. HSCs can also be hematopoietic stem cells that are CD34-/CD38-. Stem cells that may lack c-kit on the cell surface that are considered in the art as HSCs are within the ambit of the invention, as well as CD133+ cells likewise considered HSCs in the art.

[0537] The CRISPR-Cas (system may be engineered to target genetic locus or loci in HSCs. In one example embodiment, the Cas effector(s) can be codon-optimized for a eukaryotic cell and especially a mammalian cell, e.g., a human cell, for instance, HSC, or iPSC and sgRNA targeting a locus or loci in HSC, such as circulatory disease, can be prepared. These may be delivered via particles. The particles may be formed by the Cas effector (e.g., Cas9) protein and the gRNA being admixed. The gRNA and Cas effector (e.g., Cas9) protein mixture can be, for example, admixed with a mixture comprising or consisting essentially of or consisting of surfactant, phospholipid, biodegradable polymer, lipoprotein and alcohol, whereby particles containing the gRNA and Cas effector (e.g. Cas9) protein may be formed. The invention comprehends so making particles and particles from such a method as well as uses thereof. Particles suitable delivery of the CRISPR-Cas systems in the context of blood or circulatory system or HSC delivery to the blood or circulatory system are described in greater detail elsewhere herein.

[0538] In one example embodiment, after ex vivo modification the HSCs or iPCS can be expanded prior to administration to the subject. Expansion of HSCs can be via any suitable method such as that described by, Lee, “Improved ex vivo expansion of adult hematopoietic stem cells by overcoming CUL4-mediated degradation of HOXB4.” Blood. 2013 May 16;121(20):4082-9. Doi: 10.1182/blood-2012-09-455204. Epub 2013 Mar. 21.

[0539] In one example embodiment, the HSCs or iPSCs modified can be autologous. In one example embodiment, the HSCs or iPSCs can be allogenic. In addition to the modification of the disease gene(s), allogenic cells can be further modified using the composition, system, described herein to reduce the immunogenicity of the cells when delivered to the recipient. Such techniques are described elsewhere herein and e.g. Cartier, “MINI-SYMPOSIUM: X-Linked Adrenoleukodystrophypa, Hematopoietic Stem Cell Transplantation and Hematopoietic Stem Cell Gene Therapy in X-Linked Adrenoleukodystrophy,” Brain Pathology 20 (2010) 857-862, which can be adapted for use with the composition, system, herein.

### Treating Diseases of the Brain

[0540] In one example embodiment, the compositions, systems, described herein can be used to treat diseases of the brain and CNS. Delivery options for the brain include encapsulation of CRISPR enzyme and guide RNA in the form of either DNA or RNA into liposomes and conjugating to molecular Trojan horses for trans-blood brain barrier (BBB) delivery. Molecular Trojan horses have been shown to be effective for delivery of B-gal expression vectors into the brain of non-human primates. The same approach can be used to delivery vectors containing CRISPR enzyme and guide RNA. For instance, Xia CF and Boado R J, Pardridge W M (“Antibody-mediated targeting of siRNA via the human insulin receptor using avidin-biotin technology.” Mol Pharm. 2009 May.-Jun.;6(3):747-51. Doi: 10.1021/mp800194) describes how delivery of short interfering RNA (siRNA) to cells in culture, and in vivo, is possible with combined use of a receptor-specific monoclonal antibody (mAb) and avidin-biotin technology. The authors also report that because the bond between the targeting mAb and the siRNA is stable with avidin-biotin technology, and RNAi effects at distant sites such as brain are observed in vivo following an intravenous administration of the targeted siRNA, the teachings of which can be adapted for use with the compositions, systems, herein. In other embodiments, an artificial virus can be generated for CNS and/or brain delivery. See e.g. Zhang et al. (Mol Ther. 2003 January;7(1):11-8.)), the teachings of which can be adapted for use with the compositions, systems, herein.

### Treating Hearing Diseases

[0541] In one example embodiment the composition, system, described herein can be used to treat a hearing disease or hearing loss in one or both ears. Deafness is often caused by lost or damaged hair cells that cannot relay signals to auditory neurons. In such cases, cochlear implants may be used to respond to sound and transmit electrical signals to the nerve cells. But these neurons often degenerate and retract from the cochlea as fewer growth factors are released by impaired hair cells.

[0542] In one example embodiment, the composition, system, or modified cells can be delivered to one or both ears for treating or preventing hearing disease or loss by any suitable method or technique. Suitable methods and techniques include, but are not limited to those set forth in US patent application 20120328580 describes injection of a pharmaceutical composition into the ear (e.g., auricular administration), such as into the luminae of the cochlea (e.g., the Scala media, Sc vestibulae, and Sc tympani), e.g., using a syringe, e.g., a single-dose syringe. For example, one or more of the compounds described herein can be administered by intratympanic injection (e.g., into the middle ear), and/or injections into the outer, middle, and/or inner ear; administration in situ, via a catheter or pump (see e.g. McKenna et al., (U.S. Publication No. 2006/0030837) and Jacobsen et al., (U.S. Pat. No. 7,206,639); administration in combination with a mechanical device such as a cochlear implant or a hearing aid, which is worn in the outer ear (see e.g. U.S. Publication No. 2007/0093878, which provides an exemplary cochlear implant suitable for delivery of the compositions, systems, described herein to the ear). Such methods are routinely used in the art, for example, for the administration of steroids and antibiotics into human ears. Injection can be, for example, through the round window of the ear or through the cochlear capsule. Other inner ear administration methods are known in the art (see, e.g., Salt and Plontke, Drug Discovery Today, 10:1299-1306, 2005). In one example embodiment, a catheter or pump can be positioned, e.g., in the ear (e.g., the outer, middle, and/or inner ear) of a patient during a surgical procedure. In one example embodiment, a catheter or pump can be positioned, e.g., in the ear (e.g., the outer, middle, and/or inner ear) of a patient without the need for a surgical procedure.

[0543] In general, the cell therapy methods described in US patent application 20120328580 can be used to promote complete or partial differentiation of a cell to or towards a mature cell type of the inner ear (e.g., a hair cell) in vitro. Cells resulting from such methods can then be transplanted or implanted into a patient in need of such treatment. The cell culture methods required to practice these methods, including methods for identifying and selecting suitable cell types, methods for promoting complete or partial differentiation of selected cells, methods for identifying complete or partially differentiated cell types, and methods for implanting complete or partially differentiated cells are described below.

[0544] Cells suitable for use in the present invention include, but are not limited to, cells that are capable of differentiating completely or partially into a mature cell of the inner ear, e.g., a hair cell (e.g., an inner and/or outer hair cell), when contacted, e.g., in vitro, with one or more of the compounds described herein. Exemplary cells that are capable of differentiating into a hair cell include, but are not limited to stem cells (e.g., inner ear stem cells, adult stem cells, bone marrow derived stem cells, embryonic stem cells, mesenchymal stem cells, skin stem cells, iPS cells, and fat derived stem cells), progenitor cells (e.g., inner ear progenitor cells), support cells (e.g., Deiters' cells, pillar cells, inner phalangeal cells, tectal cells and Hensen's cells), and/or germ cells. The use of stem cells for the replacement of inner ear sensory cells is described in Li et al., (U.S. Publication No. 2005/0287127) and Li et al., (U.S. patent Ser. No. 11/953,797). The use of bone marrow derived stem cells for the replacement of inner ear sensory cells is described in Edge et al., PCT/US2007/084654. iPS cells are described, e.g., at Takahashi et al., Cell, Volume 131, Issue 5, Pages 861-872 (2007); Takahashi and Yamanaka, Cell 126, 663-76 (2006); Okita et al., Nature 448, 260-262 (2007); Yu, J. et al., Science 318(5858):1917-1920 (2007); Nakagawa et al., Nat. Biotechnol. 26:101-106 (2008); and Zaehres and Scholer, Cell 131(5):834-835 (2007). Such suitable cells can be identified by analyzing (e.g., qualitatively or quantitatively) the presence of one or more tissue specific genes. For example, gene expression can be detected by detecting the protein product of one or more tissue-specific genes. Protein detection techniques involve staining proteins (e.g., using cell extracts or whole cells) using antibodies against the appropriate antigen. In this case, the appropriate antigen is the protein product of the tissue-specific gene expression. Although, in principle, a first antibody (i.e., the antibody that binds the antigen) can be labeled, it is more common (and improves the visualization) to use a second antibody directed against the first (e.g., an anti-IgG). This second antibody is conjugated either with fluorochromes, or appropriate enzymes for colorimetric reactions, or gold beads (for electron microscopy), or with the biotin-avidin system, so that the location of the primary antibody, and thus the antigen, can be recognized.

[0545] The composition and system may be delivered to the ear by direct application of pharmaceutical composition to the outer ear, with compositions modified from US Published application, 20110142917. In one example embodiment the pharmaceutical composition is applied to the ear canal. Delivery to the ear may also be referred to as aural or optic delivery.

[0546] In one example embodiment, the compositions, systems, or components thereof and/or vectors or vector systems can be delivered to ear via a transfection to the inner ear through the intact round window by a novel proteidic delivery technology which may be applied to the nucleic acid-targeting system of the present invention (see, e.g., Qi et al., Gene Therapy (2013), 1-9). About 40 μl of 10 mM RNA may be contemplated as the dosage for administration to the ear.

[0547] According to Rejali et al. (Hear Res. 2007 June;228(1-2):180-7), cochlear implant function can be improved by good preservation of the spiral ganglion neurons, which are the target of electrical stimulation by the implant and brain derived neurotrophic factor (BDNF) has previously been shown to enhance spiral ganglion survival in experimentally deafened ears. Rejali et al. tested a modified design of the cochlear implant electrode that includes a coating of fibroblast cells transduced by a viral vector with a BDNF gene insert. To accomplish this type of ex vivo gene transfer, Rejali et al. transduced guinea pig fibroblasts with an adenovirus with a BDNF gene cassette insert, and determined that these cells secreted BDNF and then attached BDNF-secreting cells to the cochlear implant electrode via an agarose gel, and implanted the electrode in the scala tympani. Rejali et al. determined that the BDNF expressing electrodes were able to preserve significantly more spiral ganglion neurons in the basal turns of the cochlea after 48 days of implantation when compared to control electrodes and demonstrated the feasibility of combining cochlear implant therapy with ex vivo gene transfer for enhancing spiral ganglion neuron survival. Such a system may be applied to the nucleic acid-targeting system of the present invention for delivery to the ear.

[0548] In one example embodiment, the system set forth in Mukherj ea et al. (Antioxidants & Redox Signaling, Volume 13, Number 5, 2010) can be adapted for transtympanic administration of the composition, system, or component thereof to the ear. In one example embodiment, a dosage of about 2 mg to about 4 mg of CRISPR Cas for administration to a human.

[0549] In one example embodiment, the system set forth in [Jung et al. (Molecular Therapy, vol. 21 no. 4, 834-841 Apr. 2013) can be adapted for vestibular epithelial delivery of the composition, system, or component thereof to the ear. In one example embodiment, a dosage of about 1 to about 30 mg of CRISPR Cas for administration to a human.

### Treating Diseases in Non-Dividing Cells

[0550] In one example embodiment, the gene or transcript to be corrected is in a non-dividing cell. Exemplary non-dividing cells are muscle cells or neurons. Non-dividing (especially non-dividing, fully differentiated) cell types present issues for gene targeting or genome engineering, for example because homologous recombination (HR) is generally suppressed in the G1 cell-cycle phase. However, while studying the mechanisms by which cells control normal DNA repair systems, Durocher discovered a previously unknown switch that keeps HR “off” in non-dividing cells and devised a strategy to toggle this switch back on. Orthwein et al. (Daniel Durocher's lab at the Mount Sinai Hospital in Ottawa, Canada) recently reported (Nature 16142, published online 9 Dec. 2015) have shown that the suppression of HR can be lifted and gene targeting successfully concluded in both kidney (293T) and osteosarcoma (U2OS) cells. Tumor suppressors, BRCA1, PALB2 and BRAC2 are known to promote DNA DSB repair by HR. They found that formation of a complex of BRCA1 with PALB2-BRAC2 is governed by a ubiquitin site on PALB2, such that action on the site by an E3 ubiquitin ligase. This E3 ubiquitin ligase is composed of KEAP1 (a PALB2-interacting protein) in complex with cullin-3 (CUL3)-RBX1. PALB2 ubiquitylation suppresses its interaction with BRCA1 and is counteracted by the deubiquitylase USP11, which is itself under cell cycle control. Restoration of the BRCA1-PALB2 interaction combined with the activation of DNA-end resection is sufficient to induce homologous recombination in G1, as measured by a number of methods including a CRISPR-Cas9-based gene-targeting assay directed at USP11 or KEAP1 (expressed from a pX459 vector). However, when the BRCA1-PALB2 interaction was restored in resection-competent G1 cells using either KEAP1 depletion or expression of the PALB2-KR mutant, a robust increase in gene-targeting events was detected. These teachings can be adapted for and/or applied to the Cas compositions, systems, described herein.

[0551] Thus, reactivation of HR in cells, especially non-dividing, fully differentiated cell types is preferred, in some embodiments. In one example embodiment, promotion of the BRCA1-PALB2 interaction is preferred in one example embodiment. In one example embodiment, the target ell is a non-dividing cell. In one example embodiment, the target cell is a neuron or muscle cell. In one example embodiment, the target cell is targeted in vivo. In one example embodiment, the cell is in G1 and HR is suppressed. In one example embodiment, use of KEAP1 depletion, for example inhibition of expression of KEAP1 activity, is preferred. KEAP1 depletion may be achieved through siRNA, for example as shown in Orthwein et al. Alternatively, expression of the PALB2-KR mutant (lacking all eight Lys residues in the BRCA1-interaction domain is preferred, either in combination with KEAP1 depletion or alone. PALB2-KR interacts with BRCA1 irrespective of cell cycle position. Thus, promotion or restoration of the BRCA1-PALB2 interaction, especially in G1 cells, is preferred in one example embodiment, especially where the target cells are non-dividing, or where removal and return (ex vivo gene targeting) is problematic, for example neuron or muscle cells. KEAP1 siRNA is available from ThermoFischer. In one example embodiment, a BRCA1-PALB2 complex may be delivered to the G1 cell. In one example embodiment, PALB2 deubiquitylation may be promoted for example by increased expression of the deubiquitylase USP11, so it is envisaged that a construct may be provided to promote or up-regulate expression or activity of the deubiquitylase USP11.

### Treating Diseases of the Eye

[0552] In one example embodiment, the disease to be treated is a disease that affects the eyes. Thus, in one example embodiment, the composition, system, or component thereof described herein is delivered to one or both eyes.

[0553] The composition, system, can be used to correct ocular defects that arise from several genetic mutations further described in Genetic Diseases of the Eye, Second Edition, edited by Elias I. Traboulsi, Oxford University Press, 2012.

[0554] In one example embodiment, the condition to be treated or targeted is an eye disorder. In one example embodiment, the eye disorder may include glaucoma. In one example embodiment, the eye disorder includes a retinal degenerative disease. In one example embodiment, the retinal degenerative disease is selected from Stargardt disease, Bardet-Biedl Syndrome, Best disease, Blue Cone Monochromacy, Choroidermia, Cone-rod dystrophy, Congenital Stationary Night Blindness, Enhanced S-Cone Syndrome, Juvenile X-Linked Retinoschisis, Leber Congenital Amaurosis, Malattia Leventinesse, Norrie Disease or X-linked Familial Exudative Vitreoretinopathy, Pattern Dystrophy, Sorsby Dystrophy, Usher Syndrome, Retinitis Pigmentosa, Achromatopsia or Macular dystrophies or degeneration, Retinitis Pigmentosa, Achromatopsia, and age related macular degeneration. In one example embodiment, the retinal degenerative disease is Leber Congenital Amaurosis (LCA) or Retinitis Pigmentosa. Other exemplary eye diseases are described in greater detail elsewhere herein.

[0555] In one example embodiment, the composition, system, is delivered to the eye, optionally via intravitreal injection or subretinal injection. Intraocular injections may be performed with the aid of an operating microscope. For subretinal and intravitreal injections, eyes may be prolapsed by gentle digital pressure and fundi visualized using a contact lens system consisting of a drop of a coupling medium solution on the cornea covered with a glass microscope slide coverslip. For subretinal injections, the tip of a 10-mm 34-gauge needle, mounted on a 5-μl Hamilton syringe may be advanced under direct visualization through the superior equatorial sclera tangentially towards the posterior pole until the aperture of the needle was visible in the subretinal space. Then, 2 μl of vector suspension may be injected to produce a superior bullous retinal detachment, thus confirming subretinal vector administration. This approach creates a self-sealing sclerotomy allowing the vector suspension to be retained in the subretinal space until it is absorbed by the RPE, usually within 48 h of the procedure. This procedure may be repeated in the inferior hemisphere to produce an inferior retinal detachment. This technique results in the exposure of approximately 70% of neurosensory retina and RPE to the vector suspension. For intravitreal injections, the needle tip may be advanced through the sclera 1 mm posterior to the corneoscleral limbus and 2 μl of vector suspension injected into the vitreous cavity. For intracameral injections, the needle tip may be advanced through a corneoscleral limbal paracentesis, directed towards the central cornea, and 2 μl of vector suspension may be injected. For intracameral injections, the needle tip may be advanced through a corneoscleral limbal paracentesis, directed towards the central cornea, and 2 μl of vector suspension may be injected. These vectors may be injected at titers of either 1.0-1.4×10¹⁰ or 1.0-1.4×10⁹ transducing units (TU)/ml.

[0556] In one example embodiment, for administration to the eye, lentiviral vectors. In one example embodiment, the lentiviral vector is an equine infectious anemia virus (EIAV) vector. Exemplary EIAV vectors for eye delivery are described in Balagaan, J Gene Med 2006; 8: 275-285, Published online 21 Nov. 2005 in Wiley InterScience (www.interscience.wiley.com). DOI: 10.1002/jgm. 845; Binley et al., HUMAN GENE THERAPY 23:980-991 (September 2012), which can be adapted for use with the composition, system, described herein. In one example embodiment, the dosage can be 1.1×10⁵ transducing units per eye (TU/eye) in a total volume of 100 μl.

[0557] Other viral vectors can also be used for delivery to the eye, such as AAV vectors, such as those described in Campochiaro et al., Human Gene Therapy 17:167-176 (February 2006), Millington-Ward et al. (Molecular Therapy, vol. 19 no. 4, 642-649 Apr. 2011; Dalkara et al. (Sci Transl Med 5, 189ra76 (2013)), which can be adapted for use with the composition, system, described herein. In one example embodiment, the dose can range from about 10⁶ to 10^{9.5} particle units. In the context of the Millington-Ward AAV vectors, a dose of about 2×10¹¹ to about 6×10¹³ virus particles can be administered. In the context of Dalkara vectors, a dose of about 1×10¹⁵ to about 1×10¹⁶ vg/ml administered to a human.

[0558] In one example embodiment, the sd-rxRNA® system of Rxi Pharmaceuticals may be used/and or adapted for delivering composition, system, to the eye. In this system, a single intravitreal administration of 3 μg of sd-rxRNA results in sequence-specific reduction of PPIB mRNA levels for 14 days. The sd-rxRNA® system may be applied to the nucleic acid-targeting system of the present invention, contemplating a dose of about 3 to 20 mg of CRISPR administered to a human.

[0559] In other embodiments, the methods of US Patent Publication No. 20130183282, which is directed to methods of cleaving a target sequence from the human rhodopsin gene, may also be modified to the nucleic acid-targeting system of the present invention.

[0560] In other embodiments, the methods of US Patent Publication No. 20130202678 for treating retinopathies and sight-threatening ophthalmologic disorders relating to delivering of the Puf-A gene (which is expressed in retinal ganglion and pigmented cells of eye tissues and displays a unique anti-apoptotic activity) to the sub-retinal or intravitreal space in the eye. In particular, desirable targets are zgc:193933, prdm1a, spata2, texl0, rbb4, ddx3, zp2.2, Blimp-1 and HtrA2, all of which may be targeted by the composition, system, of the present invention.

[0561] Wu (Cell Stem Cell,13:659-62, 2013) designed a guide RNA that led Cas9 to a single base pair mutation that causes cataracts in mice, where it induced DNA cleavage. Then using either the other wild-type allele or oligos given to the zygotes repair mechanisms corrected the sequence of the broken allele and corrected the cataract-causing genetic defect in mutant mouse. This approach can be adapted to and/or applied to the compositions, systems, described herein.

[0562] US Patent Publication No. 20120159653, describes use of zinc finger nucleases to genetically modify cells, animals and proteins associated with macular degeneration (MD), the teachings of which can be applied to and/or adapted for the compositions, systems, described herein.

[0563] One aspect of US Patent Publication No. 20120159653 relates to editing of any chromosomal sequences that encode proteins associated with MD which may be applied to the nucleic acid-targeting system of the present invention.

### Treating Muscle Diseases and Cardiovascular Diseases

[0564] In one example embodiment, the composition, system, can be used to treat and/or prevent a muscle disease and associated circulatory or cardiovascular disease or disorder. The present invention also contemplates delivering the composition, system, described herein, e.g. Cas effector protein systems, to the heart. For the heart, a myocardium tropic adeno-associated virus (AAVM) is preferred, in particular AAVM41 which showed preferential gene transfer in the heart (see, e.g., Lin-Yanga et al., PNAS, Mar. 10, 2009, vol. 106, no. 10). Administration may be systemic or local. A dosage of about 1-10×10 14 vector genomes are contemplated for systemic administration. See also, e.g., Eulalio et al. (2012) Nature 492: 376 and Somasuntharam et al. (2013) Biomaterials 34: 7790, the teachings of which can be adapted for and/or applied to the compositions, systems, described herein.

[0565] For example, US Patent Publication No. 20110023139, the teachings of which can be adapted for and/or applied to the compositions, systems, described herein describes use of zinc finger nucleases to genetically modify cells, animals and proteins associated with cardiovascular disease. Cardiovascular diseases generally include high blood pressure, heart attacks, heart failure, and stroke and TIA. Any chromosomal sequence involved in cardiovascular disease or the protein encoded by any chromosomal sequence involved in cardiovascular disease may be utilized in the methods described in this disclosure. The cardiovascular-related proteins are typically selected based on an experimental association of the cardiovascular-related protein to the development of cardiovascular disease. For example, the production rate or circulating concentration of a cardiovascular-related protein may be elevated or depressed in a population having a cardiovascular disorder relative to a population lacking the cardiovascular disorder. Differences in protein levels may be assessed using proteomic techniques including but not limited to Western blot, immunohistochemical staining, enzyme linked immunosorbent assay (ELISA), and mass spectrometry. Alternatively, the cardiovascular-related proteins may be identified by obtaining gene expression profiles of the genes encoding the proteins using genomic techniques including but not limited to DNA microarray analysis, serial analysis of gene expression (SAGE), and quantitative real-time polymerase chain reaction (Q-PCR). Exemplary chromosomal sequences can be found in Table 9.

[0566] The compositions, systems, herein can be used for treating diseases of the muscular system. The present invention also contemplates delivering the composition, system, described herein, e.g. Cas (e.g. Cas9 and/or Cas12) effector protein systems, to muscle(s).

[0567] In one example embodiment, the muscle disease to be treated is a muscle dystrophy such as DMD. In one example embodiment, the composition, system, such as a system capable of RNA modification, described herein can be used to achieve exon skipping to achieve correction of the diseased gene. As used herein, the term “exon skipping” refers to the modification of pre-mRNA splicing by the targeting of splice donor and/or acceptor sites within a pre-mRNA with one or more complementary antisense oligonucleotide(s) (AONs). By blocking access of a spliceosome to one or more splice donor or acceptor site, an AON may prevent a splicing reaction thereby causing the deletion of one or more exons from a fully-processed mRNA. Exon skipping may be achieved in the nucleus during the maturation process of pre-mRNAs. In some examples, exon skipping may include the masking of key sequences involved in the splicing of targeted exons by using a composition, system, described herein capable of RNA modification. In one example embodiment, exon skipping can be achieved in dystrophin mRNA. In one example embodiment, the composition, system, can induce exon skipping at exon 1, 2, 3, 4, 5, 6, 7, 8, 10, 11, 12, 13, 14, 15, 16, 17, 18, 19, 20, 21, 22, 23, 24, 25, 26, 27, 28, 29, 30, 31, 32, 33, 34, 45, 36, 37, 38, 39, 40, 41, 42, 43, 44, 45, 46, 47, 48, 49, 50, 51, 52, 53, 54, 55, 56, 57, 58, 59, 60, 61, 62, 63, 64, 65, 66, 67, 68, 69, 70, 71, 72, 73, 74, 75, 76, 77, 78, 79, or any combination thereof of the dystrophin mRNA. In one example embodiment, the composition, system, can induce exon skipping at exon 43, 44, 50, 51, 52, 55, or any combination thereof of the dystrophin mRNA. Mutations in these exons, can also be corrected using non-exon skipping polynucleotide modification methods.

[0568] In one example embodiment, for treatment of a muscle disease, the method of Bortolanza et al. Molecular Therapy vol. 19 no. 11, 2055-264 Nov. 2011) may be applied to an AAV expressing CRISPR Cas and injected into humans at a dosage of about 2×10¹⁵ or 2×1016 vg of vector. The teachings of Bortolanza et al., can be adapted for and/or applied to the compositions, systems, described herein.

[0569] In one example embodiment, the method of Dumonceaux et al. (Molecular Therapy vol. 18 no. 5, 881-887 May 2010) may be applied to an AAV expressing CRISPR Cas and injected into humans, for example, at a dosage of about 10¹⁴ to about 10¹⁵ vg of vector. The teachings of Dumonceaux described herein can be adapted for and/or applied to the compositions, systems, described herein.

[0570] In one example embodiment, the method of Kinouchi et al. (Gene Therapy (2008) 15, 1126-1130) may be applied to CRISPR Cas systems described herein and injected into a human, for example, at a dosage of about 500 to 1000 ml of a 40 μM solution into the muscle.

[0571] In one example embodiment, the method of Hagstrom et al. (Molecular Therapy Vol. 10, No. 2, August 2004) can be adapted for and/or applied to the compositions, systems, herein and injected at a dose of about 15 to about 50 mg into the great saphenous vein of a human.

### Treating Diseases of the Liver and Kidney

[0572] In one example embodiment, the composition, system, or component thereof described herein can be used to treat a disease of the kidney or liver. Thus, in one example embodiment, delivery of the CRISPR-Cas system or component thereof described herein is to the liver or kidney.

[0573] Delivery strategies to induce cellular uptake of the therapeutic nucleic acid include physical force or vector systems such as viral-, lipid- or complex-based delivery, or nanocarriers. From the initial applications with less possible clinical relevance, when nucleic acids were addressed to renal cells with hydrodynamic high-pressure injection systemically, a wide range of gene therapeutic viral and non-viral carriers have been applied already to target posttranscriptional events in different animal kidney disease models in vivo (Csaba Revesz and Peter Hamar (2011). Delivery Methods to Target RNAs in the Kidney, Gene Therapy Applications, Prof. Chunsheng Kang (Ed.), ISBN: 978-953-307-541-9, InTech, Available from: www.intechopen.com/books/gene-therapy-applications/delivery-methods-to-target-rnas-inthe-kidney). Delivery methods to the kidney may include those in Yuan et al. (Am J Physiol Renal Physiol 295: F605-F617, 2008). The method of Yuang et al. may be applied to the CRISPR Cas system of the present invention contemplating a 1-2 g subcutaneous injection of CRISPR Cas conjugated with cholesterol to a human for delivery to the kidneys. In one example embodiment, the method of Molitoris et al. (J Am Soc Nephrol 20: 1754-1764, 2009) can be adapted to the CRISPR-Cas system of the present invention and a cumulative dose of 12-20 mg/kg to a human can be used for delivery to the proximal tubule cells of the kidneys. In one example embodiment, the methods of Thompson et al. (Nucleic Acid Therapeutics, Volume 22, Number 4, 2012) can be adapted to the CRISPR-Cas system of the present invention and a dose of up to 25 mg/kg can be delivered via i.v. administration. In one example embodiment, the method of Shimizu et al. (J Am Soc Nephrol 21: 622-633, 2010) can be adapted to the CRISPR-Cas system of the present invention and a dose of about of 10-20 mol CRISPR Cas complexed with nanocarriers in about 1-2 liters of a physiologic fluid for i.p. administration can be used.

[0574] Other various delivery vehicles can be used to deliver the composition, system, to the kidney such as viral, hydrodynamic, lipid, polymer nanoparticles, aptamers and various combinations thereof (see e.g. Larson et al., Surgery, (Aug. 2007), Vol. 142, No. 2, pp. (262-269); Hamar et al., Proc Natl Acad Sci, (Oct 2004), Vol. 101, No. 41, pp. (14883-14888); Zheng et al., Am J Pathol, (Oct 2008), Vol. 173, No. 4, pp. (973-980); Feng et al., Transplantation, (May 2009), Vol. 87, No. 9, pp. (1283-1289); Q. Zhang et al., PloS ONE, (Jul 2010), Vol. 5, No. 7, e11709, pp. (1-13); Kushibikia et al., J Controlled Release, (Jul 2005), Vol. 105, No. 3, pp. (318-331); Wang et al., Gene Therapy, (Jul 2006), Vol. 13, No. 14, pp. (1097-1103); Kobayashi et al., Journal of Pharmacology and Experimental Therapeutics, (Feb. 2004), Vol. 308, No. 2, pp. (688-693); Wolfrum et al., Nature Biotechnology, (Sep 2007), Vol. 25, No. 10, pp. (1149-1157); Molitoris et al., J Am Soc Nephrol, (Aug. 2009), Vol. 20, No. 8 pp. (1754-1764); Mikhaylova et al., Cancer Gene Therapy, (Mar. 2011), Vol. 16, No. 3, pp. (217-226); Y. Zhang et al., J Am Soc Nephrol, (Apr. 2006), Vol. 17, No. 4, pp. (1090-1101); Singhal et al., Cancer Res, (May. 2009), Vol. 69, No. 10, pp. (4244-4251); Malek et al., Toxicology and Applied Pharmacology, (Apr. 2009), Vol. 236, No. 1, pp. (97-108); Shimizu et al., J Am Soc Nephrology, (Apr. 2010), Vol. 21, No. 4, pp. (622-633); Jiang et al., Molecular Pharmaceutics, (May.-Jun. 2009), Vol. 6, No. 3, pp. (727-737); Cao et al, J Controlled Release, (Jun. 2010), Vol. 144, No. 2, pp. (203-212); Ninichuk et al., Am J Pathol, (Mar 2008), Vol. 172, No. 3, pp. (628-637); Purschke et al., Proc Natl Acad Sci, (Mar. 2006), Vol. 103, No. 13, pp. (5173-5178).

[0575] In one example embodiment, delivery is to liver cells. In one example embodiment, the liver cell is a hepatocyte. Delivery of the composition and system herein may be via viral vectors, especially AAV (and in particular AAV2/6) vectors. These can be administered by intravenous injection. A preferred target for the liver, whether in vitro or in vivo, is the albumin gene. This is a so-called ‘safe harbor” as albumin is expressed at very high levels and so some reduction in the production of albumin following successful gene editing is tolerated. It is also preferred as the high levels of expression seen from the albumin promoter/enhancer allows for useful levels of correct or transgene production (from the inserted donor template) to be achieved even if only a small fraction of hepatocytes are edited. See sites identified by Wechsler et al. (reported at the 57t h Annual Meeting and Exposition of the American Society of Hematology abstract available online at https://ash.confex.com/ash/2015/webprogram/Paper86495.html and presented on 6^{th} December 2015) which can be adapted for use with the compositions, systems, herein.

[0576] Exemplary liver and kidney diseases that can be treated and/or prevented are described elsewhere herein.

### Treating Epithelial and Lung Diseases

[0577] In one example embodiment, the disease treated or prevented by the composition, system, described herein can be a lung or epithelial disease. The compositions, systems, described herein can be used for treating epithelial and/or lung diseases. The present invention also contemplates delivering the composition, system, described herein, to one or both lungs.

[0578] In one example embodiment, as viral vector can be used to deliver the composition, system, or component thereof to the lungs. In one example embodiment, the AAV is an AAV-1, AAV-2, AAV-5, AAV-6, and/or AAV-9 for delivery to the lungs. (see, e.g., Li et al., Molecular Therapy, vol. 17 no. 12, 2067-277 Dec. 2009). In one example embodiment, the MOI can vary from 1×10³ to 4×10⁵ vector genomes/cell. In one example embodiment, the delivery vector can be an RSV vector as in Zamora et al. (Am J Respir Crit Care Med Vol 183. Pp 531-538, 2011. The method of Zamora et al. may be applied to the nucleic acid-targeting system of the present invention and an aerosolized CRISPR Cas, for example with a dosage of 0.6 mg/kg, may be contemplated for the present invention.

[0579] Subjects treated for a lung disease may for example receive pharmaceutically effective amount of aerosolized AAV vector system per lung endobronchially delivered while spontaneously breathing. As such, aerosolized delivery is preferred for AAV delivery in general. An adenovirus or an AAV particle may be used for delivery. Suitable gene constructs, each operably linked to one or more regulatory sequences, may be cloned into the delivery vector. In this instance, the following constructs are provided as examples: Cbh or EF 1a promoter for Cas (Cas (e.g. Cas9 and/or Cas12)), U6 or H1 promoter for guide RNA),: A preferred arrangement is to use a CFTRdelta508 targeting guide, a repair template for deltaF508 mutation and a codon optimized Cas (e.g. Cas9 and/or Cas12) enzyme, with optionally one or more nuclear localization signal or sequence(s) (NLS(s)), e.g., two (2) NLSs.

### Treating Diseases of the Skin

[0580] The compositions, systems, described herein can be used for the treatment of skin diseases. The present invention also contemplates delivering the composition, system, described herein, to the skin.

[0581] In one example embodiment, delivery to the skin (intradermal delivery) of the composition, system, or component thereof can be via one or more microneedles or microneedle containing device. For example, in one example embodiment the device and methods of Hickerson et al. (Molecular Therapy Nucleic Acids (2013) 2, e129) can be used and/or adapted to deliver the composition, system, described herein, for example, at a dosage of up to 300 μl of 0.1 mg/ml CRISPR-Cas (e.g. Cas9 and/or Cas12) system to the skin.

[0582] In one example embodiment, the methods and techniques of Leachman et al. (Molecular Therapy, vol. 18 no. 2, 442-446 Feb. 2010) can be used and/or adapted for delivery of a CIRPSR-Cas system described herein to the skin.

[0583] In one example embodiment, the methods and techniques of Zheng et al. (PNAS, Jul. 24, 2012, vol. 109, no. 30, 11975-11980) can be used and/or adapted for nanoparticle delivery of a CRISPR-Cas system described herein to the skin. In one example embodiment, as dosage of about 25 nM applied in a single application can achieve gene knockdown in the skin.

### Treating Cancer

[0584] The compositions, systems, described herein can be used for the treatment of cancer. The present invention also contemplates delivering the composition, system, described herein, to a cancer cell. Also, as is described elsewhere herein the compositions, systems, can be used to modify an immune cell, such as a CAR or CAR T cell, which can then in turn be used to treat and/or prevent cancer. This is also described in WO2015161276, the disclosure of which is hereby incorporated by reference and described herein below.

[0585] Target genes suitable for the treatment or prophylaxis of cancer can include those set forth in Tables 9 and 10. In one example embodiment, target genes for cancer treatment and prevention can also include those described in WO2015048577 the disclosure of which is hereby incorporated by reference and can be adapted for and/or applied to the composition, system, described herein.

### Diseases

[0586] Genetic Diseases and Diseases with a Genetic and/or Epigenetic Aspect

[0587] The compositions, systems, or components thereof can be used to treat and/or prevent a genetic disease or a disease with a genetic and/or epigenetic aspect. The genes and conditions exemplified herein are not exhaustive. In one example embodiment, a method of treating and/or preventing a genetic disease can include administering a composition, system, and/or one or more components thereof to a subject, where the composition, system, and/or one or more components thereof is capable of modifying one or more copies of one or more genes associated with the genetic disease or a disease with a genetic and/or epigenetic aspect in one or more cells of the subject. In one example embodiment, modifying one or more copies of one or more genes associated with a genetic disease or a disease with a genetic and/or epigenetic aspect in the subject can eliminate a genetic disease or a symptom thereof in the subject. In one example embodiment, modifying one or more copies of one or more genes associated with a genetic disease or a disease with a genetic and/or epigenetic aspect in the subject can decrease the severity of a genetic disease or a symptom thereof in the subject. In one example embodiment, the compositions, systems, or components thereof can modify one or more genes or polynucleotides associated with one or more diseases, including genetic diseases and/or those having a genetic aspect and/or epigenetic aspect, including but not limited to, any one or more set forth in Table 9. It will be appreciated that those diseases and associated genes listed herein are non-exhaustive and non-limiting. Further some genes play roles in the development of multiple diseases.

TABLE 9
Exemplary Genetic and Other Diseases and Associated Genes

| | Primary | | |
|---|---|---|---|
| | Tissues or | Additional | |
| | System | Tissues/Systems | |
| Disease Name | Affected | Affected | Genes |
| Achondroplasia | Bone and | | fibroblast growth factor receptor 3 |
| | Muscle | | (FGFR3) |
| Achromatopsia | eye | | CNGA3, CNGB3, GNAT2, PDE6C, |
| | | | PDE6H, ACHM2, ACHM3, |
| Acute Renal Injury | kidney | | NfkappaB, AATF, p85alpha, FAS, |
| | | | Apoptosis cascade elements (e.g. |
| | | | FASR, Caspase 2, 3, 4, 6, 7, 8, 9, 10, |
| | | | AKT, TNF alpha, IGF1, IGF1R, |
| | | | RIPK1), p53 |
| Age Related Macular | eye | | Abcr; CCL2; CC2; CP |
| Degeneration | | | (ceruloplasmin); Timp3; cathepsinD; |
| | | | VLDLR, CCR2 |
| AIDS | Immune System | | KIR3DL1, NKAT3, NKB1, AMB11, |
| | | | KIR3DS1, IFNG, CXCL12, SDF1 |
| Albinism (including | Skin, hair, eyes, | | TYR, OCA2, TYRP1, and SLC45A2, |
| oculocutaneous albinism (types | | | SLC24A5 and C10orf11 |
| 1-7) and ocular albinism) | | | |
| Alkaptonuria | Metabolism of | Tissues/organs | HGD |
| | amino acids | where | |
| | | homogentisic | |
| | | acid | |
| | | accumulates, | |
| | | particularly | |
| | | cartilage (joints), | |
| | | heart valves, | |
| | | kidneys | |
| alpha-1 antitrypsin deficiency | Lung | Liver, skin, | SERPINAI, those set forth in |
| (AATD or A1AD) | | vascular system, | WO2017165862, PiZ allele |
| | | kidneys, GI | |
| ALS | CNS | | SOD1; ALS2; ALS3; ALS5; |
| | | | ALS7; STEX; FUS; TARDBP; VEGF |
| | | | (VEGF-a; |
| | | | VEGF-b; VEGF-c); DPP6; NEFH, |
| | | | PTGS1, SLC1A2, TNFRSF10B, |
| | | | PRPH, HSP90AA1, CRIA2, IFNG, |
| | | | AMPA2 S100B, FGF2, AOX1, CS, |
| | | | TXN, RAPHJ1, MAP3K5, NBEAL1, |
| | | | GPX1, ICA1L, RAC1, MAPT, ITPR2, |
| | | | ALS2CR4, GLS, ALS2CR8, CNTFR, |
| | | | ALS2CR11, FOLH1, FAM117B, |
| | | | P4HB, CNTF, SQSTM1, STRADB, |
| | | | NAIP, NLR, YWHAQ, SLC33A1, |
| | | | TRAK2, SCA1, NIF3L1, NIF3, |
| | | | PARD3B, COX8A, CDK15, HECW1, |
| | | | HECT, C2, WW 15, NOS1, MET, |
| | | | SOD2, HSPB1, NEFL, CTSB, ANG, |
| | | | HSPA8, Rnase A, VAPB, VAMP, |
| | | | SNCA, alpha HGF, CAT, ACTB, |
| | | | NEFM, TH, BCL2, FAS, CASP3, |
| | | | CLU, SMN1, G6PD, BAX, HSF1, |
| | | | RNF19A, JUN, ALS2CR12, HSPA5, |
| | | | MAPK14, APEX1, TXNRD1, NOS2, |
| | | | TIMP1, CASP9, XIAP, GLG1, EPO, |
| | | | VEGFA, ELN, GDNF, NFE2L2, |
| | | | SLC6A3, HSPA4, APOE, PSMB8, |
| | | | DCTN2, TIMP3, KIFAP3, SLC1A1, |
| | | | SMN2, CCNC, STUB1, ALS2, |
| | | | PRDX6, SYP, CABIN1, CASP1, |
| | | | GART, CDK5, ATXN3, RTN4, |
| | | | C1QB, VEGFC, HTT, PARK7, XDH, |
| | | | GFAP, MAP2, CYCS, FCGR3B, CCS, |
| | | | UBL5, MMP9m SLC18A3, TRPM7, |
| | | | HSPB2, AKT1, DEERL1, CCL2, |
| | | | NGRN, GSR, TPPP3, APAF1, |
| | | | BTBD10, GLUD1, CXCR4, S:C1A3, |
| | | | FLT1, PON1, AR, LIF, ERBB3, |
| | | | :GA:S1, CD44, TP53, TLR3, GRIA1, |
| | | | GAPDH, AMPA, GRIK1, DES, |
| | | | CHAT, FLT4, CHMP2B, BAG1, |
| | | | CHRNA4, GSS, BAK1, KDR, GSTP1, |
| | | | OGG1, IL6 |
| Alzheimer's Disease | Brain | | E1; CHIP; UCH; UBB; Tau; LRP; |
| | | | PICALM; CLU; PS1; |
| | | | SORL1; CR1; VLDLR; UBA1; |
| | | | UBA3; CHIP28; AQP1; UCHL1; |
| | | | UCHL3; APP, AAA, CVAP, AD1, |
| | | | APOE, AD2, DCP1, ACE1, MPO, |
| | | | PACIP1, PAXIP1L, PTIP, A2M, |
| | | | BLMH, BMH, PSEN1, AD3, ALAS2, |
| | | | ABCA1, BIN1, BDNF, BTNL8, |
| | | | C1ORF49, CDH4, CHRNB2, |
| | | | CKLFSF2, CLEC4E, CR1L, CSF3R, |
| | | | CST3, CYP2C, DAPK1, ESR1, |
| | | | FCAR, FCGR3B, FFA2, FGA, GAB2, |
| | | | GALP, GAPDHS, GMPB, HP, HTR7, |
| | | | IDE, IF127, IFI6, IFIT2, IL1RN, IL- |
| | | | IRA, IL8RA, IL8RB, JAG1, KCNJ15, |
| | | | LRP6, MAPT, MARK4, MPHOSPH1, |
| | | | MTHFR, NBN, NCSTN, NIACR2, |
| | | | NMNAT3, NTM, ORM1, P2RY13, |
| | | | PBEF1, PCK1, PICALM, PLAU, |
| | | | PLXNC1, PRNP, PSEN1, PSEN2, |
| | | | PTPRA, RALGPS2, RGSL2, |
| | | | SELENBP1, SLC25A37, SORL1, |
| | | | Mitoferrin-1, TF, TFAM, TNF, |
| | | | TNFRSF10C, UBE1C |
| Amyloidosis | | | APOA1, APP, AAA, CVAP, AD1, |
| | | | GSN, FGA, LYZ, TTR, PALB |
| Amyloid neuropathy | | | TTR, PALB |
| Anemia | Blood | | CDAN1, CDA1, RPS19, DBA, PKLR, |
| | | | PK1, NT5C3, UMPH1, PSN1, RHAG, |
| | | | RH50A, NRAMP2, SPTB, ALAS2, |
| | | | ANH1, ASB, ABCB7, ABC7, ASAT |
| Angelman Syndrome | Nervous system, | | UBE3A |
| | brain | | |
| Attention Deficit Hyperactivity | Brain | | PTCHD1 |
| Disorder (ADHD) | | | |
| Autoimmune lymphoproliferative | Immune system | | TNFRSF6, APT1, FAS, CD95, |
| syndrome | | | ALPS1A |
| Autism, Autism spectrum | Brain | | PTCHD1; Mecp2; BZRAP1; MDGA2; |
| disorders (ASDs), including | | | Sema5A; Neurexin 1; GLO1, RTT, |
| Asperger's and a general | | | PPMX, MRX16, RX79, NLGN3, |
| diagnostic category called | | | NLGN4, KIAA1260, AUTSX2, |
| Pervasive Developmental | | | FMR1, FMR2; FXR1; FXR2; |
| Disorders (PDDs) | | | MGLUR5, ATP10C, CDH10, GRM6, |
| | | | MGLUR6, CDH9, CNTN4, NLGN2, |
| | | | CNTNAP2, SEMA5A, DHCR7, |
| | | | NLGN4X, NLGN4Y, DPP6, NLGN5, |
| | | | EN2, NRCAM, MDGA2, NRXN1, |
| | | | FMR2, AFF2, FOXP2, OR4M2, |
| | | | OXTR, FXR1, FXR2, PAH, |
| | | | GABRA1, PTEN, GABRA5, PTPRZ1, |
| | | | GABRB3, GABRG1, HIRIP3, |
| | | | SEZ6L2, HOXA1, SHANK3, IL6, |
| | | | SHBZRAP1, LAMB1, SLC6A4, |
| | | | SERT, MAPK3, TAS2R1, MAZ, |
| | | | TSC1, MDGA2, TSC2, MECP2, |
| | | | UBE3A, WNT2, see also |
| | | | 20110023145 |
| autosomal dominant polycystic | kidney | liver | PKD1, PKD2 |
| kidney disease (ADPKD) - | | | |
| (includes diseases such as von | | | |
| Hippel-Lindau disease and | | | |
| tuberous sclerosis complex | | | |
| disease) | | | |
| Autosomal Recessive Polycystic | kidney | liver | PKDH1 |
| Kidney Disease (ARPKD) | | | |
| Ataxia-Telangiectasia (a.k.a | Nervous system, | various | ATM |
| Louis Bar syndrome) | immune system | | |
| B-Cell Non-Hodgkin Lymphoma | | | BCL7A, BCL7 |
| Bardet-Biedl syndrome | Eye, | Liver, ear, | ARL6, BBS1, BBS2, BBS4, BBS5, |
| | musculoskeletal | gastrointestinal | BBS7, BBS9, BBS10, BBS12, |
| | system, kidney, | system, brain | CEP290, INPP5E, LZTFL1, MKKS, |
| | reproductive | | MKS1, SDCCAG8, TRIM32, TTC8 |
| | organs | | |
| Bare Lymphocyte Syndrome | blood | | TAPBP, TPSN, TAP2, ABCB3, PSF2, |
| | | | RING11, MHC2TA, C2TA, RFX5, |
| | | | RFXAP, RFX5 |
| Bartter's Syndrome (types I, II, | kidney | | SLC12A1 (type I), KCNJ1 (type II), |
| III, IVA and B, and V) | | | CLCNKB (type III), BSND (type IV |
| | | | A), or both the CLCNKA CLCNKB |
| | | | genes (type IV B), CASR (type V). |
| Becker muscular dystrophy | Muscle | | DMD, BMD, MYF6 |
| Best Disease (Vitelliform | eye | | VMD2 |
| Macular Dystrophy type 2 ) | | | |
| Bleeding Disorders | blood | | TBXA2R, P2RX1, P2X1 |
| Blue Cone Monochromacy | eye | | OPN1LW, OPN1MW, and LCR |
| Breast Cancer | Breast tissue | | BRCA1, BRCA2, COX-2 |
| Bruton's Disease (aka X-linked | Immune system, | | BTK |
| Agammglobulinemia) | specifically B | | |
| | cells | | |
| Cancers (e.g., lymphoma, chronic | Various | | FAS, BID, CTLA4, PDCD1, CBLB, |
| lymphocytic leukemia (CLL), B | | | PTPN6, TRAC, TRBC, those |
| cell acute lymphocytic leukemia | | | described in WO2015048577 |
| (B-ALL), acute lymphoblastic | | | |
| leukemia, acute myeloid | | | |
| leukemia, non-Hodgkin's | | | |
| lymphoma (NHL), diffuse large | | | |
| cell lymphoma (DLCL), multiple | | | |
| myeloma, renal cell carcinoma | | | |
| (RCC), neuroblastoma, colorectal | | | |
| cancer, breast cancer, ovarian | | | |
| cancer, melanoma, sarcoma, | | | |
| prostate cancer, lung cancer, | | | |
| esophageal cancer, hepatocellular | | | |
| carcinoma, pancreatic cancer, | | | |
| astrocytoma, mesothelioma, head | | | |
| and neck cancer, and | | | |
| medulloblastoma | | | |
| Cardiovascular Diseases | heart | Vascular system | IL1B, XDH, TP53, PTGS, MB, IL4, |
| | | | ANGPT1, ABCGu8, CTSK, PTGIR, |
| | | | KCNJ11, INS, CRP, PDGFRB, |
| | | | CCNA2, PDGFB, KCNJ5, KCNN3, |
| | | | CAPN10, ADRA2B, ABCG5, |
| | | | PRDX2, CPAN5, PARP14, MEX3C, |
| | | | ACE, RNF, IL6, TNF, STN, |
| | | | SERPINE1, ALB, ADIPOQ, APOB, |
| | | | APOE, LEP, MTHFR, APOA1, |
| | | | EDN1, NPPB, NOS3, PPARG, PLAT, |
| | | | PTGS2, CETP, AGTR1, HMGCR, |
| | | | IGF1, SELE, REN, PPARA, PON1, |
| | | | KNG1, CCL2, LPL, VWF, F2, |
| | | | ICAM1, TGFB, NPPA, IL10, EPO, |
| | | | SOD1, VCAM1, IFNG, LPA, MPO, |
| | | | ESR1, MAPK, HP, F3, CST3, COG2, |
| | | | MMP9, SERPINC1, F8, HMOX1, |
| | | | APOC3, IL8, PROLI, CBS, NOS2, |
| | | | TLR4, SELP, ABCA1, AGT, LDLR, |
| | | | GPT, VEGFA, NR3C2, IL18, NOS1, |
| | | | NR3C1, FGB, HGF, IL1A, AKT1, |
| | | | LIPC, HSPD1, MAPK14, SPP1, |
| | | | ITGB3, CAT, UTS2, THBD, F10, CP, |
| | | | TNFRSF11B, EGFR, MMP2, PLG, |
| | | | NPY, RHOD, MAPK8, MYC, FN1, |
| | | | CMA1, PLAU, GNB3, ADRB2, |
| | | | SOD2, F5, VDR, ALOX5, HLA- |
| | | | DRB1, PARP1, CD40LG, PON2, |
| | | | AGER, IRS1, PTGS1, ECE1, F7, |
| | | | IRMN, EPHX2, IGFBP1, MAPK10, |
| | | | FAS, ABCB1, JUN, IGFBP3, CD14, |
| | | | PDE5A, AGTR2, CD40, LCAT, |
| | | | CCR5, MMP1, TIMP1, ADM, |
| | | | DYT10, STAT3, MMP3, ELN, USF1, |
| | | | CFH, HSPA4, MMP12, MME, F2R, |
| | | | SELL, CTSB, ANXA5, ADRB1, |
| | | | CYBA, FGA, GGT1, LIPG, HIF1A, |
| | | | CXCR4, PROC, SCARB1, CD79A, |
| | | | PLTP, ADD1, FGG, SAA1, KCNH2, |
| | | | DPP4, NPR1, VTN, KIAA0101, FOS, |
| | | | TLR2, PPIG, IL1R1, AR, CYP1A1, |
| | | | SERPINA1, MTR, RBP4, APOA4, |
| | | | CDKN2A, FGF2, EDNRB, ITGA2, |
| | | | VLA-2, CABIN1, SHBG, HMGB1, |
| | | | HSP90B2P, CYP3A4, GJA1, CAV1, |
| | | | ESR2, LTA, GDF15, BDNF, |
| | | | CYP2D6, NGF, SP1, TGIF1, SRC, |
| | | | EGF, PIK3CG, HLA-A, KCNQ1, |
| | | | CNR1, FBN1, CHKA, BEST1, |
| | | | CTNNB1, IL2, CD36, PRKAB1, TPO, |
| | | | ALDH7A1, CX3CR1, TH, F9, CH1, |
| | | | TF, HFE, IL17A, PTEN, GSTM1, |
| | | | DMD, GATA4, F13A1, TTR, FABP4, |
| | | | PON3, APOC1, INSR, TNFRSF1B, |
| | | | HTR2A, CSF3, CYP2C9, TXN, |
| | | | CYP11B2, PTH, CSF2, KDR, |
| | | | PLA2G2A, THBS1, GCG, RHOA, |
| | | | ALDH2, TCF7L2, NFE2L2, |
| | | | NOTCH1, UGT1A1, IFNA1, PPARD, |
| | | | SIRT1, GNHR1, PAPPA, ARR3, |
| | | | NPPC, AHSP, PTK2, IL13, MTOR, |
| | | | ITGB2, GSTT1, IL6ST, CPB2, |
| | | | CYP1A2, HNF4A, SLC64A, |
| | | | PLA2G6, TNFSF11, SLC8A1, F2RL1, |
| | | | AKR1A1, ALDH9A1, BGLAP, |
| | | | MTTP, MTRR, SULT1A3, RAGE, |
| | | | C4B, P2RY12, RNLS, CREB1, |
| | | | POMC, RAC1, LMNA, CD59, |
| | | | SCM5A, CYP1B1, MIF, MMP13, |
| | | | TIMP2, CYP19A1, CUP21A2, |
| | | | PTPN22, MYH14, MBL2, SELPLG, |
| | | | AOC3, CTSL1, PCNA, IGF2, ITGB1, |
| | | | CAST, CXCL12, IGHE, KCNE1, |
| | | | TFRC, COL1A1, COL1A2, IL2RB, |
| | | | PLA2G10, ANGPT2, PROCR, NOX4, |
| | | | HAMP, PTPN11, SLCA1, IL2RA, |
| | | | CCL5, IRF1, CF:AR, CA:CA, EIF4E, |
| | | | GSTP1, JAK2, CYP3A5, HSPG2, |
| | | | CCL3, MYD88, VIP, SOAT1, |
| | | | ADRBK1, NR4A2, MMP8, NPR2, |
| | | | GCH1, EPRS, PPARGCIA, F12, |
| | | | PECAM1, CCL4, CERPINA34, |
| | | | CASR, FABP2, TTF2, PROS1, CTF1, |
| | | | SGCB, YME1L1, CAMP, ZC3H12A, |
| | | | AKR1B1, MMP7, AHR, CSF1, |
| | | | HDAC9, CTGF, KCNMA1, UGT1A, |
| | | | PRKCA, COMT, S100B, EGR1, PRL, |
| | | | IL15, DRD4, CAMK2G, SLC22A2, |
| | | | CCL11, PGF, THPO, GP6, TACR1, |
| | | | NTS, HNF1A, SST, KCDN1, |
| | | | LOC646627, TBXAS1, CUP2J2, |
| | | | TBXA2R, ADHIC, ALOX12, AHSG, |
| | | | BHMT, GJA4, SLC25A4, ACLY, |
| | | | ALOX5AP, NUMA1, CYP27B1, |
| | | | CYSLTR2, SOD3, LTC4S, UCN, |
| | | | GHRL, APOC2, CLEC4A, |
| | | | KBTBD10, TNC, TYMS, SHC1, |
| | | | LRP1, SOCS3, ADHIB, KLK3, |
| | | | HSD11B1, VKORC1, SERPINB2, |
| | | | TNS1, RNF19A, EPOR, ITGAM, |
| | | | PITX2, MAPK7, FCGR3A, LEEPR, |
| | | | ENG, GPX1, GOT2, HRH1, NR112, |
| | | | CRH, HTR1A, VDAC1, HPSE, |
| | | | SFTPD, TAP2, RMF123, PTK2Bm |
| | | | NTRK2, IL6R, ACHE, GLP1R, GHR, |
| | | | GSR, NQO1, NR5A1, GJB2, |
| | | | SLC9A1, MAOA, PCSK9, FCGR2A, |
| | | | SERPINF1, EDN3, UCP2, TFAP2A, |
| | | | C4BPA, SERPINF2, TYMP, ALPP, |
| | | | CXCR2, SLC3A3, ABCG2, ADA, |
| | | | JAK3, HSPAIA, FASN, FGF1, F11, |
| | | | ATP7A, CR1, GFPA, ROCK1, |
| | | | MECP2, MYLK, BCHE, LIPE, |
| | | | ADORA1, WRN, CXCR3, CD81, |
| | | | SMAD7, LAMC2, MAP3K5, CHGA, |
| | | | IAPP, RHO, ENPP1, PTHLH, NRG1, |
| | | | VEGFC, ENPEP, CEBPB, NAGLU,. |
| | | | F2RL3, CX3CL1, BDKRB1, |
| | | | ADAMTS13, ELANE, ENPP2, CISH, |
| | | | GAST, MYOC, ATP1A2, NF1, GJB1, |
| | | | MEF2A, VCL, BMPR2, TUBB, |
| | | | CDC42, KRT18, HSF1, MYB, |
| | | | PRKAA2, ROCK2, TFP1, PRKG1, |
| | | | BMP2, CTNND1, CTH, CTSS, |
| | | | VAV2, NPY2R, IGFBP2, CD28, |
| | | | GSTA1, PPIA, APOH, S100A8, IL11, |
| | | | ALOX15, FBLN1, NR1H3, SCD, GIP, |
| | | | CHGB, PRKCB, SRD5A1,HSD11B2, |
| | | | CALCRL, GALNT2, ANGPTL4, |
| | | | KCNN4, PIK3C2A, HBEGF, |
| | | | CYP7A1, HLA-DRB5, BNIP3, |
| | | | GCKR, S100A12, PADI4, HSPA14, |
| | | | CXCR1, H19, KRTAP19-3, IDDM2, |
| | | | RAC2, YRY1, CLOCK, NGFR, DBH, |
| | | | CHRNA4, CACNA1C, PRKAG2, |
| | | | CHAT, PTGDS, NR1H2, TEK, |
| | | | VEGFB, MEF2C, MAPKAPK2, |
| | | | TNFRSF11A, HSPA9, CYSLTR1, |
| | | | MAT1A, OPRL1, IMPA1, CLCN2, |
| | | | DLD, PSMA6, PSMB8, CHI3L1, |
| | | | ALDH1B1, PARP2,STAR, LBP, |
| | | | ABCC6, RGS2, EFNB2, GJB6, |
| | | | APOA2, AMPD1, DYSF, |
| | | | FDFT1,EMD2, CCR6, GJB3, IL1RL1, |
| | | | ENTPD1, BBS4, CELSR2, F11R, |
| | | | RAPGEF3, HYAL1, ZNF259, |
| | | | ATOX1, ATF6, KHK, SAT1, GGH, |
| | | | TIMP4, SLC4A4, PDE2A, PDE3B, |
| | | | FADS1, FADS2, TMSB4X, TXNIP, |
| | | | LIMS1, RHOB, LY96, FOXO1, |
| | | | PNPLA2, TRH, GJC1, S:C17A5, FTO, |
| | | | GJD2, PRSC1, CASP12, GPBAR1, |
| | | | PXK, IL33, TRIB1, PBX4, NUPR1, |
| | | | 15-SEP, CILP2, TERC, GGT2, |
| | | | MTCO1, UOX, AVP |
| Cataract | eye | | CRYAA, CRYA1, CRYBB2, CRYB2, |
| | | | PITX3, BFSP2, CP49, CP47, CRYAA, |
| | | | CRYA1, PAX6, AN2, MGDA, |
| | | | CRYBA1, CRYB1, CRYGC, CRYG3, |
| | | | CCL, LIM2, MP19, CRYGD, CRYG4, |
| | | | BFSP2, CP49, CP47, HSF4, CTM, |
| | | | HSF4, CTM, MIP, AQPO, CRYAB, |
| | | | CRYA2, CTPP2, CRYBB1, CRYGD, |
| | | | CRYG4, CRYBB2, CRYB2, CRYGC, |
| | | | CRYG3, CCL, CRYAA, CRYA1, |
| | | | GJA8, CX50, CAE1, GJA3, CX46, |
| | | | CZP3, CAE3, CCM1, CAM, KRIT1 |
| CDKL-5 Deficiencies or | Brain, CNS | | CDKL5 |
| Mediated Diseases | | | |
| Charcot-Marie-Tooth (CMT) | Nervous system | Muscles | PMP22 (CMT1A and E), MPZ |
| disease (Types 1, 2, 3, 4,) | | (dystrophy) | (CMT1B), LITAF (CMT1C), EGR2 |
| | | | (CMTID), NEFL (CMT1F), GJB1 |
| | | | (CMT1X), MFN2 (CMT2A), KIF1B |
| | | | (CMT2A2B), RAB7A (CMT2B), |
| | | | TRPV4 (CMT2C), GARS (CMT2D), |
| | | | NEFL (CMT2E), GAPD1 (CMT2K), |
| | | | HSPB8 (CMT2L), DYNC1H1, |
| | | | CMT2O), LRSAM1 (CMT2P), |
| | | | IGHMBP2 (CMT2S), MORC2 |
| | | | (CMT2Z), GDAP1 (CMT4A), |
| | | | MTMR2 or SBF2/MTMR13 |
| | | | (CMT4B), SH3TC2 (CMT4C), |
| | | | NDRG1 (CMT4D), PRX (CMT4F), |
| | | | FIG4 (CMT4J), NT-3 |
| Chédiak-Higashi Syndrome | Immune system | Skin, hair, eyes, | LYST |
| | | neurons | |
| Choroidermia | | | CHM, REP1, |
| Chorioretinal atrophy | eye | | PRDM13, RGR, TEAD1 |
| Chronic Granulomatous Disease | Immune system | | CYBA, CYBB, NCF1, NCF2, NCF4 |
| Chronic Mucocutaneous | Immune system | | AIRE, CARD9, CLEC7A IL12B, |
| Candidiasis | | | IL12B1, IL1F, IL17RA, IL17RC, |
| | | | RORC, STAT1, STAT3, TRAF31P2 |
| Cirrhosis | liver | | KRT18, KRT8, CIRH1A, NAIC, |
| | | | TEX292, KIAA1988 |
| Colon cancer (Familial | Gastrointestinal | | FAP: APC HNPCC: |
| adenomatous polyposis (FAP) | | | MSH2, MLH1, PMS2, SH6, PMS1 |
| and hereditary nonpolyposis | | | |
| colon cancer (HNPCC)) | | | |
| Combined Immunodeficiency | Immune System | | IL2RG, SCIDX1, SCIDX, IMD4); |
| | | | HIV-1 (CCL5, SCYA5, D17S136E, |
| | | | TCP228 |
| Cone(-rod) dystrophy | eye | | AIPL1, CRX, GUAIA, GUCY2D, |
| | | | PITPM3, PROM1, PRPH2, RIMS1, |
| | | | SEMA4A, ABCA4, ADAM9, ATF6, |
| | | | C21ORF2, C8ORF37, CACNA2D4, |
| | | | CDHR1, CERKL, CNGA3, CNGB3, |
| | | | CNNM4, CNAT2, IFT81, KCNV2, |
| | | | PDE6C, PDE6H, POC1B, RAX2, |
| | | | RDH5, RPGRIP1, TTLL5, RetCG1, |
| | | | GUCY2E |
| Congenital Stationary Night | eye | | CABP4, CACNA1F, CACNA2D4, |
| Blindness | | | GNAT1, CPR179, GRK1, GRM6, |
| | | | LRIT3, NYX, PDE6B, RDH5, RHO, |
| | | | RLBP1, RPE65, SAG, SLC24A1, |
| | | | TRPM1, |
| Congenital Fructose Intolerance | Metabolism | | ALDOB |
| Cori's Disease (Glycogen | Various- | | AGL |
| Storage Disease Type III) | wherever | | |
| | glycogen | | |
| | accumulates, | | |
| | particularly | | |
| | liver, heart, | | |
| | skeletal muscle | | |
| Corneal clouding and dystrophy | eye | | APOA1, TGFBI, CSD2, CDGG1, |
| | | | CSD, BIGH3, CDG2, TACSTD2, |
| | | | TROP2, MIS1, VSX1, RINX, PPCD, |
| | | | PPD, KTCN, COL8A2, FECD, |
| | | | PPCD2, PIP5K3, CFD |
| Cornea plana congenital | | | KERA, I2 |
| Cri du chat Syndrome, also | | | Deletions involving only band 5p15.2 |
| known as 5p syndrome and cat | | | to the entire short arm of chromosome |
| cry syndrome | | | 5, e.g. CTNND2, TERT, |
| Cystic Fibrosis (CF) | Lungs and | Pancreas, liver, | CTFR, ABCC7, CF, MRP7, SCNNIA, |
| | respiratory | digestive | those described in WO2015157070 |
| | system | system, | |
| | | reproductive | |
| | | system, | |
| | | exocrine, glands, | |
| Diabetic nephropathy | kidney | | Gremlin, 12/15- lipoxygenase, TIM44, |
| Dent Disease (Types 1 and 2) | Kidney | | Type 1: CLCN5, Type 2: ORCL |
| Dentatorubro-Pallidoluysian | CNS, brain, | | Atrophin-1 and Atn1 |
| Atrophy (DRPLA) (aka Haw | muscle | | |
| River and Naito-Oyanagi | | | |
| Disease) | | | |
| Down Syndrome | various | | Chromosome 21 trisomy |
| Drug Addiction | Brain | | Prkce; Drd2; Drd4; ABAT; |
| | | | GRIA2;Grm5; Grin1; Htr1b; Grin2a; |
| | | | Drd3; Pdyn; Gria1 |
| Duane syndrome (Types 1, 2, and | eye | | CHN1, indels on chromosomes 4 and 8 |
| 3, including subgroups A, B and | | | |
| C). Other names for this | | | |
| condition include: Du'ne's | | | |
| Retraction Syndrome (or DR | | | |
| syndrome), Eye Retraction | | | |
| Syndrome, Retraction Syndrome, | | | |
| Congenital retraction syndrome | | | |
| and Stilling-Turk-Duane | | | |
| Syndrome | | | |
| Duchenne muscular dystrophy | muscle | Cardiovascular, | DMD, BMD, dystrophin gene, intron |
| (DMD) | | respiratory | flanking exon 51 of DMD gene, exon |
| | | | 51 mutations in DMD gene, see also |
| | | | WO2013163628 and US Pat. Pub. |
| | | | 20130145487 |
| Edw'rd's Syndrome | | | Complete or partial trisomy of |
| (Trisomy 18) | | | chromosome 18 |
| Ehlers-Danlos Syndrome (Types | Various | | COL5A1, COL5A2, COL1A1, |
| I-VI) | depending on | | COL3A1, TNXB, PLOD1, COL1A2, |
| | type: including | | FKBP14 and ADAMTS2 |
| | musculoskeletal, | | |
| | eye, vasculature, | | |
| | immune, and | | |
| | skin | | |
| Emery-Dreifuss muscular | muscle | | LMNA, LMN1, EMD2, FPLD, |
| dystrophy | | | CMD1A, HGPS, LGMD1B, LMNA, |
| | | | LMN1, EMD2, FPLD, CMD1A |
| Enhanced S-Cone Syndrome | eye | | NR2E3, NRL |
| Fa'ry's Disease | Various - | | GLA |
| | including skin, | | |
| | eyes, and | | |
| | gastrointestinal | | |
| | system, kidney, | | |
| | heart, brain, | | |
| | nervous system | | |
| Facioscapulohumeral muscular | muscles | | FSHMD1A, FSHD1A, FRG1, |
| dystrophy | | | |
| Factor H and Factor H-like 1 | blood | | HF1, CFH, HUS |
| Factor V Leiden thrombophilia | blood | | Factor V (F5) |
| and Factor V deficiency | | | |
| Factor V and Factor VII | blood | | MCFD2 |
| deficiency | | | |
| Factor VII deficiency | blood | | F7 |
| Factor X deficiency | blood | | F10 |
| Factor XI deficiency | blood | | F11 |
| Factor XII deficiency | blood | | F12, HAF |
| Factor XIIIA deficiency | blood | | F13A1, F13A |
| Factor XIIIB deficiency | blood | | F13B |
| Familial Hypercholestereolemia | Cardiovascular | | APOB, LDLR, PCSK9 |
| | system | | |
| Familial Mediterranean Fever | Various- | Heart, kidney, | MEFV |
| (FMF) also called recurrent | organs/tissues | brain/CNS, | |
| polyserositis or familial | with serous or | reproductive | |
| paroxysmal polyserositis | synovial | organs | |
| | membranes, | | |
| | skin, joints | | |
| Fanconi Anemia | Various - blood | | FANCA, FACA, FA1, FA, FAA, |
| | (anemia), | | FAAP95, FAAP90, FLJ34064, |
| | immune system, | | FANCC, FANCG, RAD51, BRCA1, |
| | cognitive, | | BRCA2, BRIP1, BACH1, FANCJ, |
| | kidneys, eyes, | | FANCB, FANCD1, FANCD2, |
| | musculoskeletal | | FANCD, FAD, FANCE, FACE, |
| | | | FANCF, FANCI, ERCC4, FANCL, |
| | | | FANCM, PALB2, RAD51C, SLX4, |
| | | | UBE2T, FANCB, XRCC9, PHF9, |
| | | | KIAA1596 |
| Fanconi Syndrome Types I | kidneys | | FRTS1, GATM |
| (Childhood onset) and II (Adult | | | |
| Onset) | | | |
| Fragile X syndrome and related | brain | | FMR1, FMR2; FXR1; FXR2; |
| disorders | | | mGLUR5 |
| Fragile XE Mental Retardation | Brain, nervous | | FMR1 |
| (aka Martin Bell syndrome) | system | | |
| Friedreich Ataxia (FRDA) | Brain, nervous | heart | FXN/X25 |
| | system | | |
| Fuchs endothelial corneal | Eye | | TCF4; COL8A2 |
| dystrophy | | | |
| Galactosemia | Carbohydrate | Various-where | GALT, GALK1, and GALE |
| | metabolism | galactose | |
| | disorder | accumulates - | |
| | | liver, brain, eyes | |
| Gastrointestinal Epithelial | | | CISH |
| Cancer, GI cancer | | | |
| Gaucher Disease (Types 1, 2, and | Fat metabolism | Various-liver, | GBA |
| 3, as well as other unusual forms | disorder | spleen, blood, | |
| that may not fit into these types) | | CNS, skeletal | |
| | | system | |
| Griscelli syndrome | | | |
| Glaucoma | eye | | MYOC, TIGR, GLC1A, JOAG, |
| | | | GPOA, OPTN, GLC1E, FIP2, HYPL, |
| | | | NRP, CYP1B1, GLC3A, OPA1, NTG, |
| | | | NPG, CYP1B1, GLC3A, those |
| | | | described in WO2015153780 |
| Glomerulo sclerosis | kidney | | CC chemokine ligand 2 |
| Glycogen Storage Diseases | Metabolism | | SLC2A2, GLUT2, G6PC, G6PT, |
| Types I-VI -See also Cori's | Diseases | | G6PT1, GAA, LAMP2, LAMPB, |
| Disease, Pompe's Disease, | | | AGL, GDE, GBE1, GYS2, PYGL, |
| McArdle's disease, Hers Disease, | | | PFKM, see also Cori's Disease, |
| and Von Gierke's disease | | | Pompe's Disease, McArdle's disease, |
| | | | Hers Disease, and Von Gierke's |
| | | | disease |
| RBC Glycolytic enzyme | blood | | any mutations in a gene for an enzyme |
| deficiency | | | in the glycolysis pathway including |
| | | | mutations in genes for hexokinases I |
| | | | and II, glucokinase, phosphoglucose |
| | | | isomerase, phosphofructokinase, |
| | | | aldolase Bm triosephosphate |
| | | | isomereas242holerae242242242ydedee- |
| | | | 3-phosphate dehydrogenase, |
| | | | phosphoglycerokinase, |
| | | | phosphoglycerate mutase, enolase I, |
| | | | pyruvate kinase |
| Hart'up's disease | Malabsorption | Various- brain, | SLC6A19 |
| | disease | gastrointestinal, | |
| | | skin, | |
| Hearing Loss | ear | | NOX3, Hes5, BDNF, |
| Hemochromatosis (HH) | Iron absorption | Various- | HFE and H63D |
| | regulation | wherever iron | |
| | disease | accumulates, | |
| | | liver, heart, | |
| | | pancreas, joints, | |
| | | pituitary gland | |
| Hemophagocytic | blood | | PRF1, HPLH2, UNC13D, MUNC13- |
| lymphohistiocytosis disorders | | | 4, HPLH3, HLH3, FHL3 |
| Hemorrhagic disorders | blood | | PI, ATT, F5 |
| Hers disease (Glycogen storage | liver | muscle | PYGL |
| disease Type VI) | | | |
| Hereditary angioedema | | | |
| (HAE)242holerae242242ein B1 | | | |
| Hereditary Hemorrhagic | Skin and | | ACVRL1, ENG and SMAD4 |
| Telangiectasia (Osler-Weber- | mucous | | |
| Rendu Syndrome) | membranes | | |
| Hereditary Spherocytosis | blood | | NK1, EPB42, SLC4A1, SPTA1, and |
| | | | SPTB |
| Hereditary Persistence of Fetal | blood | | HBG1, HBG2, BCL11A, promoter |
| Hemoglobin | | | region of HBG 1 and/or 2 (in the |
| | | | CCAAT box) |
| Hemophilia (hemophilia A | blood | | A: FVIII, F8C, HEMA |
| (Classic) a B (aka Christmas | | | B: FVIX, HEMB |
| disease) and C) | | | C: F9, F11 |
| Hepatic adenoma | liver | | TCF1, HNF1A, MODY3 |
| Hepatic failure, early onset, and | liver | | SCOD1, SCO1 |
| neurologic disorder | | | |
| Hepatic lipase deficiency | liver | | LIPC |
| Hepatoblastoma, cancer and | liver | | CTNNB1, PDGFRL, PDGRL, PRLTS, |
| carcinomas | | | AXIN1, AXIN, CTNNB1, TP53, P53, |
| | | | LFS1, IGF2R, MPRI, MET, CASP8, |
| | | | MCH5 |
| Hermansky-Pudlak syndrome | Skin, eyes, | | HPS1, HPS3, HPS4, HPS5, HPS6, |
| | blood, lung, | | HPS7, DTNBP1, BLOC1, BLOC1S2, |
| | kidneys, | | BLOC3 |
| | intestine | | |
| HIV susceptibility or infection | Immune system | | IL10, CSIF, CMKBR2, CCR2, |
| | | | CMKBR5, CCCKR5 (CCR5), those in |
| | | | WO2015148670A1 |
| Holoprosencephaly (HPE) | brain | | ACVRL1, ENG, SMAD4 |
| (Alobar, Semilobar, and Lobar) | | | |
| Homocystinuria | Metabolic | Various- | CBS, MTHFR, MTR, MTRR, and |
| | disease | connective | MMADHC |
| | | tissue, muscles, | |
| | | CNS, | |
| | | cardiovascular | |
| | | system | |
| HPV | | | HPV16 and HPV18 E6/E7 |
| HSV1, HSV2, and related | eye | | HSV1 genes (immediate early and late |
| keratitis | | | HSV-1 genes (UL1, 1.5, 5, 6, 8, 9, 12, |
| | | | 15, 16, 18, 19, 22, 23, 26, 26.5, 27, 28, |
| | | | 29, 30, 31, 32, 33, 34, 35, 36, 37, 38, |
| | | | 42, 48, 49.5, 50, 52, 54, S6, RL2, RS1, |
| | | | those described in WO2015153789, |
| | | | WO2015153791 |
| Hun'er's Syndrome (aka | Lysosomal | Various- liver, | IDS |
| Mucopolysaccharidosis type II) | storage disease | spleen, eye, | |
| | | joint, heart, | |
| | | brain, skeletal | |
| Hunting'on's disease (HD) and | Brain, nervous | | HD, HTT, IT15, PRNP, PRIP, JPH3, |
| HD-like disorders | system | | JP3, HDL2, TBP, SCA17, PRKCE; |
| | | | IGF1; EP300; RCOR1; PRKCZ; |
| | | | HDAC4; and TGM2, and those |
| | | | described in WO2013130824, |
| | | | WO2015089354 |
| Hur'er's Syndrome (aka | Lysosomal | Various- liver, | IDUA, α-L-iduronidase |
| mucopolysaccharidosis type I H, | storage disease | spleen, eye, | |
| MPS IH) | | joint, heart, | |
| | | brain, skeletal | |
| Hurler-Scheie syndrome (aka | Lysosomal | Various- liver, | IDUA, β-L-iduronidase |
| mucopolysaccharidosis type I H- | storage disease | spleen, eye, | |
| S, MPS I H-S) | | joint, heart, | |
| | | brain, skeletal | |
| hyaluronidase deficiency (aka | Soft and | | HYAL1 |
| MPS IX) | connective | | |
| | tissues | | |
| Hyper IgM syndrome | Immune system | | CD40L |
| Hyper- tension caused renal | kidney | | Mineral corticoid receptor |
| damage | | | |
| Immunodeficiencies | Immune System | | CD3E, CD3G, AICDA, AID, HIGM2, |
| | | | TNFRSF5, CD40, UNG, DGU, |
| | | | HIGM4, TNFSF5, CD40LG, HIGM1, |
| | | | IGM, FOXP3, IPEX, AIID, XPID, |
| | | | PIDX, TNFRSF14B, TACI |
| Inborn errors of metabolism: | Metabolism | Various organs | See also: Carbohydrate metabolism |
| including urea cycle disorders, | diseases, liver | and cells | disorders (e.g. galactosemia), Amino |
| organic acidemias), fatty acid | | | acid Metabolism disorders (e.g. |
| oxidation defects, amino | | | phenylketonuria), Fatty acid |
| acidopathies, carbohydrate | | | metabolism (e.g. MCAD deficiency), |
| disorders, mitochondrial | | | Urea Cycle disorders (e.g. |
| disorders | | | Citrullinemia), Organic acidemias (e.g. |
| | | | Maple Syrup Urine disease), |
| | | | Mitochondrial disorders (e.g. |
| | | | MELAS), peroxisomal disorders (e.g. |
| | | | Zellweger syndrome) |
| Inflammation | Various | | IL-10; IL-1 (IL-1a; IL-1b); IL-13; IL- |
| | | | 17 (IL-17a (CTLA8); IL- |
| | | | 17b; IL-17c; IL-17d; IL-17f); II-23; |
| | | | Cx3cr1; ptpn22; TNFa; |
| | | | NOD2/CARD 15 for IBD; IL-6; IL-12 |
| | | | (IL-12a; IL-12b); |
| | | | CTLA4; Cx3cl1 |
| Inflammatory Bowel Diseases | Gastrointestinal | Joints, skin | NOD2, IRGM, LRRK2, ATG5, |
| (e.g. Ulcerative Colitis and | | | ATG16L1, IRGM, GATM, ECM1, |
| Ch'on's Disease) | | | CDH1, LAMB1, HNF4A, GNA12, |
| | | | IL10, CARD9/15. CCR6, IL2RA, |
| | | | MST1, TNFSF15, REL, STAT3, |
| | | | IL23R, IL12B, FUT2 |
| Interstitial renal fibrosis | kidney | | TGF-β type II receptor |
| 'ob's Syndrome (aka Hyper IgE | Immune System | | STAT3, DOCK8 |
| Syndrome) | | | |
| Juvenile Retinoschisis | eye | | RS1, XLRS1 |
| Kabuki Syndrome 1 | | | MLL4, KMT2D |
| Kennedy Disease (aka | Muscles, brain, | | SBMA/SMAX1/AR |
| Spinobulbar Muscular Atrophy) | nervous system | | |
| Klinefelter syndrome | Various- | | Extra X chromosome in males |
| | particularly | | |
| | those involved | | |
| | in development | | |
| | of male | | |
| | characteristics | | |
| Lafora Disease | Brain, CNS | | EMP2A and EMP2B |
| Leber Congenital Amaurosis | eye | | CRB1, RP12, CORD2, CRD, CRX, |
| | | | IMPDH1, OTX2, AIPL1, CABP4, |
| | | | CCT2, CEP290, CLUAP1, CRB1, |
| | | | CRX, DTHD1, GDF6, GUCY2D, |
| | | | IFT140, IQCB1, KCNJ13, LCA5, |
| | | | LRAT, NMNAT1, PRPH2, RD3, |
| | | | RDH12, RPE65, RP20, RPGRIP1, |
| | | | SPATA7, TULP1, LCA1, LCA4, |
| | | | GUC2D, CORD6, LCA3, |
| Lesch-Nyhan Syndrome | Metabolism | Various - joints, | HPRT1 |
| | disease | cognitive, brain, | |
| | | nervous system | |
| Leukocyte deficiencies and | blood | | ITGB2, CD18, LCAMB, LAD, |
| disorders | | | EIF2B1, EIF2BA, EIF2B2, EIF2B3, |
| | | | EIF2B5, LVWM, CACH, CLE, |
| | | | EIF2B4 |
| Leukemia | Blood | | TAL1, TCL5, SCL, TAL2, FLT3, |
| | | | NBS1, NBS, ZNFN1A1, IK1, LYF1, |
| | | | HOXD4, HOX4B, BCR, CML, PHL, |
| | | | ALL, ARNT, KRAS2, RASK2, |
| | | | GMPS, AF10, ARHGEF12, LARG, |
| | | | KIAA0382, CALM, CLTH, CEBPA, |
| | | | CEBP, CHIC2, BTL, FLT3, KIT, |
| | | | PBT, LPP, NPM1, NUP214, D9S46E, |
| | | | CAN, CAIN, RUNX1, CBFA2, |
| | | | AML1, WHSC1L1, NSD3, FLT3, |
| | | | AF1Q, NPM1, NUMA1, ZNF145, |
| | | | PLZF, PML, MYL, STAT5B, AF10, |
| | | | CALM, CLTH, ARL11, ARLTS1, |
| | | | P2RX7, P2X7, BCR, CML, PHL, |
| | | | ALL, GRAF, NF1, VRNF, WSS, |
| | | | NFNS, PTPN11, PTP2C, SHP2, NS1, |
| | | | BCL2, CCND1, PRAD1, BCL1, |
| | | | TCRA, GATA1, GF1, ERYF1, NFE1, |
| | | | ABL1, NQO1, DIA4, NMOR1, |
| | | | NUP214, D9S46E, CAN, CAIN |
| Limb-girdle muscular dystrophy | muscle | | LGMD |
| diseases | | | |
| Lowe syndrome | brain, eyes, | | OCRL |
| | kidneys | | |
| Lupus glomerulo- nephritis | kidney | | MAPK1 |
| Machado- | Brain, CNS, | | ATX3 |
| Joseph's Disease (also known as | muscle | | |
| Spinocerebellar ataxia Type 3) | | | |
| Macular degeneration | eye | | ABC4, CBC1, CHMI, APOE, |
| | | | C1QTNF5, C2, C3, CCL2, CCR2, |
| | | | CD36, CFB, CFH, CFHR1, CFHR3, |
| | | | CNGB3, CP, CRP, CST3, CTSD, |
| | | | CX3CR1, ELOVL4, ERCC6, FBLN5, |
| | | | FBLN6, FSCN2, HMCN1, HTRA1, |
| | | | IL6, IL8, PLEKHAI, PROM1, |
| | | | PRPH2, RPGR, SERPING1, TCOF1, |
| | | | TIMP3, TLR3 |
| Macular Dystrophy | eye | | BEST1, CIQTNF5, CTNNA1, |
| | | | EFEMP1, ELOVL4, FSCN2, |
| | | | GUCA1B, HMCN1, IMPG1, OTX2, |
| | | | PRDM13, PROMI, PRPH2, RP1L1, |
| | | | TIMP3, ABCA4, CFH, DRAM2, |
| | | | IMG1, MFSD8, ADMD, STGD2, |
| | | | STGD3, RDS, RP7, PRPH, AVMD, |
| | | | AOFMD, VMD2 |
| Malattia Leventinesse | eye | | EFEMP1, FBLN3 |
| Maple Syrup Urine Disease | Metabolism | | BCKDHA, BCKDHB, and DBT |
| | disease | | |
| Marfan syndrome | Connective | Musculoskeletal | FBN1 |
| | tissue | | |
| Maroteaux-Lamy Syndrome (aka | Musculoskeletal | Liver, spleen | ARSB |
| MPS VI) | system, nervous | | |
| | system | | |
| McAr'le's Disease (Glycogen | Glycogen | muscle | PYGM |
| Storage Disease Type V) | storage disease | | |
| Medullary cystic kidney disease | kidney | | UMOD, HNFJ, FJHN, MCKD2, |
| | | | ADMCKD2 |
| Metachromatic leukodystrophy | Lysosomal | Nervous system | ARSA |
| | storage disease | | |
| Methylmalonic acidemia (MMA) | Metabolism | | MMAA, MMAB, MUT, MMACHC, |
| | disease | | MMADHC, LMBRD1 |
| Morquio Syndrome (aka MPS IV | Connective | heart | GALNS |
| A and B) | tissue, skin, | | |
| | bone, eyes | | |
| Mucopolysaccharidosis diseases | Lysosomal | | See also Hurler/Scheie syndrome, |
| (Types I H/S, I H, II, III A B and | storage disease - | | Hurler disease, Sanfillipo syndrome, |
| C, IS, IVA and B, IX, VII, and | affects various | | Scheie syndrome, Morquio syndrome, |
| VI) | organs/tissues | | hyaluronidase deficiency, Sly |
| | | | syndrome, and Maroteaux-Lamy |
| | | | syndrome |
| Muscular Atrophy | muscle | | VAPB, VAPC, ALS8, SMN1, SMA1, |
| | | | SMA2, SMA3, SMA4, BSCL2, |
| | | | SPG17, GARS, SMAD1, CMT2D, |
| | | | HEXB, IGHMBP2, SMUBP2, |
| | | | CATF1, SMARD1 |
| Muscular dystrophy | muscle | | FKRP, MDCIC, LGMD2I, LAMA2, |
| | | | LAMM, LARGE, KIAA0609, |
| | | | MDC1D, FCMD, TTID, MYOT, |
| | | | CAPN3, CANP3, DYSF, LGMD2B, |
| | | | SGCG, LGMD2C, DMDA1, SCG3, |
| | | | SGCA, ADL, DAG2, LGMD2D, |
| | | | DMDA2, SGCB, LGMD2E, SGCD, |
| | | | SGD, LGMD2F, CMD1L, TCAP, |
| | | | LGMD2G, CMD1N, TRIM32, HT2A, |
| | | | LGMD2H, FKRP, MDC1C, LGMD2I, |
| | | | TTN, CMD1G, TMD, LGMD2J, |
| | | | POMT1, CAV3, LGMD1C, SEPN1, |
| | | | SELN, RSMD1, PLEC1, PLTN, EBS1 |
| Myotonic dystrophy (Type 1 and | Muscles | Eyes, heart, | CNBP (Type 2) and DMPK (Type 1) |
| Type 2) | | endocrine | |
| Neoplasia | | | PTEN; ATM; ATR; EGFR; ERBB2; |
| | | | ERBB3; ERBB4; |
| | | | Notch1; Notch2; Notch3; Notch4; |
| | | | AKT; AKT2; AKT3; HIF; |
| | | | HIF1a; HIF3a; Met; HRG; Bcl2; |
| | | | PPAR alpha; PPAR |
| | | | gamma; WT1 (Wilms Tumor); FGF |
| | | | Receptor Family |
| | | | members (5 members: 1, 2, 3, 4, 5); |
| | | | CDKN2a; APC; RB |
| | | | (retinoblastoma); MEN1; VHL; |
| | | | BRCA1; BRCA2; AR |
| | | | (Androgen Receptor); TSG101; IGF; |
| | | | IGF Receptor, Igf1 (4 |
| | | | variants); Igf2 (3 variants); Igf 1 |
| | | | Receptor; Igf 2 Receptor; |
| | | | Bax; Bcl2; caspases family (9 |
| | | | members: |
| | | | 1, 2, 3, 4, 6, 7, 8, 9, 12); Kras; Apc |
| Neurofibromatosis (NF) (NF1, | brain, spinal | | NF1, NF2 |
| formerly Recklinghau'en's NF, | cord, nerves, | | |
| and NF2) | and skin | | |
| Niemann-Pick Lipidosis (Types | Lysosomal | Various- where | Types A and B: SMPD1; Type C: |
| A, B, and C) | Storage Disease | sphingomyelin | NPC1 or NPC2 |
| | | accumulates, | |
| | | particularly | |
| | | spleen, liver, | |
| | | blood, CNS | |
| Noonan Syndrome | Various - | | PTPN11, SOS1, RAF1 and KRAS |
| | musculoskeletal, | | |
| | heart, eyes, | | |
| | reproductive | | |
| | organs, blood | | |
| Norrie Disease or X-linked | eye | | NDP |
| Familial Exudative | | | |
| Vitreoretinopathy | | | |
| North Carolina Macular | eye | | MCDR1 |
| Dystrophy | | | |
| Osteogenesis imperfecta (OI) | bones, | | COL1A1, COL1A2, CRTAP, P3H |
| (Types I, II, III, IV, V, VI, VII) | musculoskeletal | | |
| Osteopetrosis | bones | | LRP5, BMND1, LRP7, LR3, OPPG, |
| | | | VBCH2, CLCN7, CLC7, OPTA2, |
| | | | OSTMI, GL, TCIRG1, TIRC7, |
| | | | OC116, OPTB1 |
| Pa'au's Syndrome | Brain, heart, | | Additional copy of chromosome 13 |
| (Trisomy 13) | skeletal system | | |
| Parkin'on's disease (PD) | Brain, nervous | | SNCA (PARK1), UCHL1 (PARK 5), |
| | system | | and LRRK2 (PARK8), (PARK3), |
| | | | PARK2, PARK4, PARK7 (PARK7), |
| | | | PINK1 (PARK6); x-Synuclein, DJ-1, |
| | | | Parkin, NR4A2, NURR1, NOT, |
| | | | TINUR, SNCAIP, TBP, SCA17, |
| | | | NCAP, PRKN, PDJ, DBH, NDUFV2 |
| Pattern Dystrophy of the RPE | eye | | RDS/peripherin |
| Phenylketonuria (PKU) | Metabolism | Various due to | PAH, PKU1, QDPR, DHPR, PTS |
| | disorder | build-up of | |
| | | phenylalanine, | |
| | | phenyl ketones | |
| | | in tissues and | |
| | | CNS | |
| Polycystic kidney and hepatic | Kidney, liver | | FCYT, PKHD1, ARPKD, PKD1, |
| disease | | | PKD2, PKD4, PKDTS, PRKCSH, |
| | | | G19P1, PCLD, SEC63 |
| Po'pe's Disease | Glycogen | Various - heart, | GAA |
| | storage disease | liver, spleen | |
| Porphyria (actually refers to a | Various- | | ALAD, ALAS2, CPOX, FECH, |
| group of different diseases all | wherever heme | | HMBS, PPOX, UROD, or UROS |
| having a specific heme | precursors | | |
| production process abnormality) | accumulate | | |
| posterior polymorphous corneal | eyes | | TCF4; COL8A2 |
| dystrophy | | | |
| Primary Hyperoxaluria (e.g. type | Various - eyes, | | LDHA (lactate dehydrogenase A) and |
| 1) | heart, kidneys, | | hydroxyacid oxidase 1 (HAO1) |
| | skeletal system | | |
| Primary Open Angle Glaucoma | eyes | | MYOC |
| (POAG) | | | |
| Primary sclerosing cholangitis | Liver, | | TCF4; COL8A2 |
| | gallbladder | | |
| Progeria (also called Hutchinson- | All | | LMNA |
| Gilford progeria syndrome) | | | |
| Prader-Willi Syndrome | Musculoskeletal | | Deletion of region of short arm of |
| | system, brain, | | chromosome 15, including UBE3A |
| | reproductive | | |
| | and endocrine | | |
| | system | | |
| Prostate Cancer | prostate | | HOXB13, MSMB, GPRC6A, TP53 |
| Pyruvate Dehydrogenase | Brain, nervous | | PDHA1 |
| Deficiency | system | | |
| Kidney/Renal carcinoma | kidney | | RLIP76, VEGF |
| Rett Syndrome | Brain | | MECP2, RTT, PPMX, MRX16, |
| | | | MRX79, CDKL5, STK9, MECP2, |
| | | | RTT, PPMX, MRX16, MRX79, x- |
| | | | Synuclein, DJ-1 |
| Retinitis pigmentosa (RP) | eye | | ADIPOR1, ABCA4, AGBL5, |
| | | | ARHGEF18, ARL2BP, ARL3, ARL6, |
| | | | BEST1, BBS1, BBS2, C2ORF71, |
| | | | C8ORF37, CA4, CERKL, CLRN1, |
| | | | CNGA1, CMGB1, CRB1, CRX, |
| | | | CYP4V2, DHDDS, DHX38, EMC1, |
| | | | EYS, FAM161A, FSCN2, GPR125, |
| | | | GUCA1B, HK1, HPRPF3, HGSNAT, |
| | | | IDH3B, IMPDH1, IMPG2, IFT140, |
| | | | IFT172, KLHL7, KIAA1549, KIZ, |
| | | | LRAT, MAK, MERTK, MVK, NEK2, |
| | | | NUROD1, NR2E3, NRL, OFD1, |
| | | | PDE6A, PDE6B, PDE6G, POMGNT1, |
| | | | PRCD, PROM1, PRPF3, PRPF4, |
| | | | PRPF6, PRPF8, PRPF31, PRPH2, |
| | | | RPB3, RDH12, REEP6, RP39, RGR, |
| | | | RHO, RLBP1, ROM1, RP1, RP1L1, |
| | | | RPY, RP2, RP9, RPE65, RPGR, |
| | | | SAMD11, SAG, SEMA4A, SLC7A14, |
| | | | SNRNP200, SPP2, SPATA7, TRNT1, |
| | | | TOPORS, TTC8, TULP1, USH2A, |
| | | | ZFN408, ZNF513, see also |
| | | | 20120204282 |
| Scheie syndrome (also known as | Various- liver, | | IDUA, α-L-iduronidase |
| mucopolysaccharidosis type I | spleen, eye, | | |
| S(MPS I-S)) | joint, heart, | | |
| | brain, skeletal | | |
| Schizophrenia | Brain | | Neuregulinl (Nrg1); Erb4 (receptor for |
| | | | Neuregulin); |
| | | | Complexin1 (Cplx1); Tph1 |
| | | | Tryptophan hydroxylase; Tph2 |
| | | | Tryptophan hydroxylase 2; Neurexin |
| | | | 1; GSK3; GSK3a; |
| | | | GSK3b; 5-HTT (Slc6a4); COMT; |
| | | | DRD (Drd1a); SLC6A3; DAOA; |
| | | | DTNBP1; Dao (Dao1); TCF4; |
| | | | COL8A2 |
| Secretase Related Disorders | Various | | APH-1 (alpha and beta); PSEN1; |
| | | | NCSTN; PEN-2; Nos1, Parp1, Nat1, |
| | | | Nat2, CTSB, APP, APHIB, PSEN2, |
| | | | PSENEN, BACE1, ITM2B, CTSD, |
| | | | NOTCH1, TNF, INS, DYT10, |
| | | | ADAM17, APOE, ACE, STN, TP53, |
| | | | IL6, NGFR, IL1B, ACHE, CTNNB1, |
| | | | IGF1, IFNG, NRG1, CASP3, MAPK1, |
| | | | CDH1, APBB1, HMGCR, CREB1, |
| | | | PTGS2, HES1, CAT, TGFB1, ENO2, |
| | | | ERBB4, TRAPPC10, MAOB, NGF, |
| | | | MMP12, JAG1, CD40LG, PPARG, |
| | | | FGF2, LRP1, NOTCH4, MAPK8, |
| | | | PREP, NOTCH3, PRNP, CTSG, EGF, |
| | | | REN, CD44, SELP, GHR, ADCYAP1, |
| | | | INSR, GFAP, MMP3, MAPK10, SP1, |
| | | | MYC, CTSE, PPARA, JUN, TIMP1, |
| | | | IL5, IL1A, MMP9, HTR4, HSPG2, |
| | | | KRAS, CYCS, SMG1, IL1R1, |
| | | | PROK1, MAPK3, NTRK1, IL13, |
| | | | MME, TKT, CXCR2, CHRM1, |
| | | | ATXNI,PAWR, NOTCJ2, M6PR, |
| | | | CYP46A1, CSNKID, MAPK14, |
| | | | PRG2, PRKCA, L1 CAM, CD40, |
| | | | NR112, JAG2, CTNND1, CMA1, |
| | | | SORT1, DLK1, THEM4, JUP, CD46, |
| | | | CCL11, CAV3, RNASE3, HSPA8, |
| | | | CASP9, CYP3A4, CCR3, TFAP2A, |
| | | | SCP2, CDK4, JOF1A, TCF7L2, |
| | | | B3GALTL, MDM2, RELA, CASP7, |
| | | | IDE, FANP4, CASK, ADCYAP1R1, |
| | | | ATF4, PDGFA, C21ORF33, SCG5, |
| | | | RMF123, NKFB1, ERBB2, CAV1, |
| | | | MMP7, TGFA, RXRA, STX1A, |
| | | | PSMC4, P2RY2, TNFRSF21, DLG1, |
| | | | NUMBL, SPN, PLSCR1, UBQLN2, |
| | | | UBQLN1, PCSK7, SPON1, SILV, |
| | | | QPCT, HESS, GCC1 |
| Selective IgA Deficiency | Immune system | | Type 1: MSH5; Type 2: TNFRSF13B |
| Severe Combined | Immune system | | JAK3, JAKL, DCLRE1C, ARTEMIS, |
| Immunodeficiency (SCID) and | | | SCIDA, RAG1, RAG2, ADA, PTPRC, |
| SCID-X1, and ADA-SCID | | | CD45, LCA, IL7R, CD3D, T3D, |
| | | | IL2RG, SCIDX1, SCIDX, IMD4, |
| | | | those identified in US Pat. App. Pub. |
| | | | 20110225664, 20110091441, |
| | | | 20100229252, 20090271881 and |
| | | | 20090222937; |
| Sickle cell disease | blood | | HBB, BCL11A, BCL11Ae, cis- |
| | | | regulatory elements of the B-globin |
| | | | locus, H½½ promoter, those |
| | | | described in WO2015148863, WO |
| | | | 2013/126794, US Pat. Pub. |
| | | | 20110182867 |
| Sly Syndrome (aka MPS VII) | | | GUSB |
| Spinocerebellar Ataxias (SCA | | | ATXN1, ATXN2, ATX3 |
| types 1, 2, 3, 6, 7, 8, 12 and 17) | | | |
| Sorsby Fundus Dystrophy | eye | | TIMP3 |
| Stargardt disease | eye | | ABCR, ELOVL4, ABCA4, PROMI |
| Tay-Sachs Disease | Lysosomal | Various - CNS, | HEX-A |
| | Storage disease | brain, eye | |
| Thalassemia (Alpha, Beta, Delta) | blood | | HBA1, HBA2 (Alpha), HBB (Beta), |
| | | | HBB and HBD (delta), LCRB, |
| | | | BCL11A, BCL11Ae, cis-regulatory |
| | | | elements of the B-globin locus, H½½ |
| | | | promoter, those described in |
| | | | WO2015148860, US Pat. Pub. |
| | | | 20110182867, 2015/148860 |
| Thymic Aplasia (DiGeorge | Immune system, | | deletion of 30 to 40 genes in the |
| Syndrome; 22q11.2 deletion | thymus | | middle of chromosome 22 at |
| syndrome) | | | a location known as 22q11.2, including |
| | | | TBX1, DGCR8 |
| Transthyretin amyloidosis | liver | | TTR (transthyretin) |
| (ATTR) | | | |
| trimethylaminuria | Metabolism | | FMO3 |
| | disease | | |
| Trinucleotide Repeat Disorders | Various | | HTT; SBMA/SMAX1/AR; |
| (generally) | | | FXN/X25 ATX3; |
| | | | ATXN1; ATXN2; |
| | | | DMPK; Atrophin-1 and Atn1 |
| | | | (DRPLA Dx); CBP (Creb--P - global |
| | | | instability); VLDLR; Atxn7; Atxn10; |
| | | | FEN1, TNRC6A, PABPN1, JPH3, |
| | | | MED15, ATXN1, ATXN3, TBP, |
| | | | CACNA1A, ATXN80S, PPP2R2B, |
| | | | ATXN7, TNRC6B, TNRC6C, CELF3, |
| | | | MAB21L1, MSH2, TMEM185A, |
| | | | SIX5, CNPY3, RAXE, GNB2, RPL14, |
| | | | ATXN8, ISR, TTR, EP400, GIGYF2, |
| | | | OGG1, STC1, CNDP1, C10ORF2, |
| | | | MAML3, DKC1, PAXIP1, CASK, |
| | | | MAPT, SP1, POLG, AFF2, THBS1, |
| | | | TP53, ESR1, CGGBP1, ABT1, KLK3, |
| | | | PRNP, JUN, KCNN3, BAX, FRAXA, |
| | | | KBTBD10, MBNL1, RAD51, |
| | | | NCOA3, ERDA1, TSC1, COMP, |
| | | | GGLC, RRAD, MSH3, DRD2, CD44, |
| | | | CTCF, CCND1, CLSPN, MEF2A, |
| | | | PTPRU, GAPDH, TRIM22, WT1, |
| | | | AHR, GPX1, TPMT, NDP, ARX, |
| | | | TYR, EGR1, UNG, NUMBL, FABP2, |
| | | | EN2, CRYGC, SRP14, CRYGB, |
| | | | PDCD1, HOXA1, ATXN2L, PMS2, |
| | | | GLA, CBL, FTH1, IL12RB2, OTX2, |
| | | | HOXA5, POLG2, DLX2, AHRR, |
| | | | MANF, RMEM158, see also |
| | | | 20110016540 |
| Tur'er's Syndrome (XO) | Various | | Monosomy X |
| | reproductive | | |
| | organs, and sex | | |
| | characteristics, | | |
| | vasculature | | |
| Tuberous Sclerosis | CNS, heart, | | TSC1, TSC2 |
| | kidneys | | |
| Usher syndrome (Types I, II, and | Ears, eyes | | ABHD12, CDH23, CIB2, CLRN1, |
| III) | | | DFNB31, GPR98, HARS, MYO7A, |
| | | | PCDH15, USHIC, USHIG, USH2A, |
| | | | USH11A, those described in |
| | | | WO2015134812A1 |
| Velocardiofacial syndrome (aka | Various - | | Many genes are deleted, COM, TBX1, |
| 22q11.2 deletion syndrome, | skeletal, heart, | | and other are associated with |
| DiGeorge syndrome, conotruncal | kidney, immune | | symptoms |
| anomaly face syndrome (CTAF), | system, brain | | |
| autosomal dominant Opitz G/BB | | | |
| syndrome or Cayler cardiofacial | | | |
| syndrome) | | | |
| Von Gie'ke's Disease (Glycogen | Glycogen | Various - liver, | G6PC and SLC37A4 |
| Storage Disease type I) | Storage disease | kidney | |
| Von Hippel-Lindau Syndrome | Various - cell | CNS, Kidney, | VHL |
| | growth | Eye, visceral | |
| | regulation | organs | |
| | disorder | | |
| Von Willebrand Disease (Types | blood | | VWF |
| I, II and III) | | | |
| Wilson Disease | Vario-s - | Liver, brains, | ATP7B |
| | Copper Storage | eyes, other | |
| | Disease | tissues where | |
| | | copper builds up | |
| Wiskott-Aldrich Syndrome | Immune System | | WAS |
| Xeroderma Pigmentosum | Skin | Nervous system | POLH |
| XXX Syndrome | Endocrine, brain | | X chromosome trisomy |

[0588] In one example embodiment, the compositions, systems, or components thereof can be used treat or prevent a disease in a subject by modifying one or more genes associated with one or more cellular functions, such as any one or more of those in Table 10. In one example embodiment, the disease is a genetic disease or disorder. In some of embodiments, the composition, system, or component thereof can modify one or more genes or polynucleotides associated with one or more genetic diseases such as any set forth in Table 10.

TABLE 10
Exemplary Genes controlling Cellular Functions

| CELLULAR FUNCTION | GENES |
|---|---|
| PI3K/AKT Signaling | PRKCE; ITGAM; ITGA5; IRAK1; PRKAA2; EIF2AK2; |
| | PTEN; EIF4E; PRKCZ; GRK6; MAPK1; TSC1; PLK1; |
| | AKT2; IKBKB; PIK3CA; CDK8; CDKN1B; NFKB2; BCL2; |
| | PIK3CB; PPP2R1A; MAPK8; BCL2L1; MAPK3; TSC2; |
| | ITGA1; KRAS; EIF4EBP1; RELA; PRKCD; NOS3; |
| | PRKAA1; MAPK9; CDK2; PPP2CA; PIM1; ITGB7; |
| | YWHAZ; ILK; TP53; RAF1; IKBKG; RELB; DYRK1A; |
| | CDKN1A; ITGB1; MAP2K2; JAK1; AKTI; JAK2; PIK3R1; |
| | CHUK; PDPK1; PPP2R5C; CTNNB1; MAP2K1; NFKB1; |
| | PAK3; ITGB3; CCND1; GSK3A; FRAP1; SFN; ITGA2; |
| | TTK; CSNK1A1; BRAF; GSK3B; AKT3; FOXO1; SGK; |
| | HSP90AA1; RPS6KB1 |
| ERK/MAPK Signaling | PRKCE; ITGAM; ITGA5; HSPB1; IRAK1; PRKAA2; |
| | EIF2AK2; RAC1; RAP1A; TLN1; EIF4E; ELK1; GRK6; |
| | MAPK1; RAC2; PLK1; AKT2; PIK3CA; CDK8; CREB1; |
| | PRKCI; PTK2; FOS; RPS6KA4; PIK3CB; PPP2R1A; |
| | PIK3C3; MAPK8; MAPK3; ITGA1; ETS1; KRAS; MYCN; |
| | EIF4EBP1; PPARG; PRKCD; PRKAA1; MAPK9; SRC; |
| | CDK2; PPP2CA; PIM1; PIK3C2A; ITGB7; YWHAZ; |
| | PPP1CC; KSR1; PXN; RAF1; FYN; DYRK1A; ITGB1; |
| | MAP2K2; PAK4; PIK3R1; STAT3; PPP2R5C; MAP2K1; |
| | PAK3; ITGB3; ESR1; ITGA2; MYC; TTK; CSNK1A1; |
| | CRKL; BRAF; ATF4; PRKCA; SRF; STAT1; SGK |
| Glucocorticoid Receptor | RAC1; TAF4B; EP300; SMAD2; TRAF6; PCAF; ELK1; |
| Signaling | MAPK1; SMAD3; AKT2; IKBKB; NCOR2; UBE2I; |
| | PIK3CA; CREB1; FOS; HSPA5; NFKB2; BCL2; |
| | MAP3K14; STAT5B; PIK3CB; PIK3C3; MAPK8; BCL2L1; |
| | MAPK3; TSC22D3; MAPK10; NRIP1; KRAS; MAPK13; |
| | RELA; STAT5A; MAPK9; NOS2A; PBX1; NR3C1; |
| | PIK3C2A; CDKNIC; TRAF2; SERPINE1; NCOA3; |
| | MAPK14; TNF; RAF1; IKBKG; MAP3K7; CREBBP; |
| | CDKN1A; MAP2K2; JAK1; IL8; NCOA2; AKT1; JAK2; |
| | PIK3R1; CHUK; STAT3; MAP2K1; NFKB1; TGFBR1; |
| | ESR1; SMAD4; CEBPB; JUN; AR; AKT3; CCL2; MMP1; |
| | STAT1; IL6; HSP90AA1 |
| Axonal Guidance Signaling | PRKCE; ITGAM; ROCK1; ITGA5; CXCR4; ADAM12; |
| | IGF1; RAC1; RAP1A; EIF4E; PRKCZ; NRP1; NTRK2; |
| | ARHGEF7; SMO; ROCK2; MAPK1; PGF; RAC2; |
| | PTPN11; GNAS; AKT2; PIK3CA; ERBB2; PRKCI; PTK2; |
| | CFL1; GNAQ; PIK3CB; CXCL12; PIK3C3; WNT11; |
| | PRKD1; GNB2L1; ABL1; MAPK3; ITGA1; KRAS; RHOA; |
| | PRKCD; PIK3C2A; ITGB7; GLI2; PXN; VASP; RAF1; |
| | FYN; ITGB1; MAP2K2; PAK4; ADAM17; AKT1; PIK3R1; |
| | GLI1; WNT5A; ADAM10; MAP2K1; PAK3; ITGB3; |
| | CDC42; VEGFA; ITGA2; EPHA8; CRKL; RND1; GSK3B; |
| | AKT3; PRKCA |
| Ephrin Receptor Signaling | PRKCE; ITGAM; ROCK1; ITGA5; CXCR4; IRAK1; |
| Actin Cytoskeleton | PRKAA2; EIF2AK2; RAC1; RAP1A; GRK6; ROCK2; |
| | MAPK1; PGF; RAC2; PTPN11; GNAS; PLK1; AKT2; |
| | DOK1; CDK8; CREB1; PTK2; CFL1; GNAQ; MAP3K14; |
| | CXCL12; MAPK8; GNB2L1; ABL1; MAPK3; ITGA1; |
| | KRAS; RHOA; PRKCD; PRKAA1; MAPK9; SRC; CDK2; |
| | PIM1; ITGB7; PXN; RAF1; FYN; DYRK1A; ITGB1; |
| | MAP2K2; PAK4; AKT1; JAK2; STAT3; ADAM10; |
| | MAP2K1; PAK3; ITGB3; CDC42; VEGFA; ITGA2; |
| | EPHA8; TTK; CSNK1A1; CRKL; BRAF; PTPN13; ATF4; |
| | AKT3; SGK |
| Signaling | ACTN4; PRKCE; ITGAM; ROCK1; ITGA5; IRAK1; |
| | PRKAA2; EIF2AK2; RAC1; INS; ARHGEF7; GRK6; |
| | ROCK2; MAPK1; RAC2; PLK1; AKT2; PIK3CA; CDK8; |
| | PTK2; CFL1; PIK3CB; MYH9; DIAPH1; PIK3C3; MAPK8; |
| | F2R; MAPK3; SLC9A1; ITGA1; KRAS; RHOA; PRKCD; |
| | PRKAA1; MAPK9; CDK2; PIM1; PIK3C2A; ITGB7; |
| | PPP1CC; PXN; VIL2; RAF1; GSN; DYRK1A; ITGB1; |
| | MAP2K2; PAK4; PIP5K1A; PIK3R1; MAP2K1; PAK3; |
| | ITGB3; CDC42; APC; ITGA2; TTK; CSNK1A1; CRKL; |
| | BRAF; VAV3; SGK |
| Huntington's Disease | PRKCE; IGF1; EP300; RCOR1; PRKCZ; HDAC4; TGM2; |
| Signaling | MAPK1; CAPNS1; AKT2; EGFR; NCOR2; SP1; CAPN2; |
| | PIK3CA; HDAC5; CREB1; PRKCI; HSPA5; REST; |
| | GNAQ; PIK3CB; PIK3C3; MAPK8; IGF1R; PRKD1; |
| | GNB2L1; BCL2L1; CAPN1; MAPK3; CASP8; HDAC2; |
| | HDAC7A; PRKCD; HDAC11; MAPK9; HDAC9; PIK3C2A; |
| | HDAC3; TP53; CASP9; CREBBP; AKT1; PIK3R1; |
| | PDPK1; CASP1; APAF1; FRAP1; CASP2; JUN; BAX; |
| | ATF4; AKT3; PRKCA; CLTC; SGK; HDAC6; CASP3 |
| Apoptosis Signaling | PRKCE; ROCK1; BID; IRAK1; PRKAA2; EIF2AK2; BAK1; |
| | BIRC4; GRK6; MAPK1; CAPNS1; PLK1; AKT2; IKBKB; |
| | CAPN2; CDK8; FAS; NFKB2; BCL2; MAP3K14; MAPK8; |
| | BCL2L1; CAPN1; MAPK3; CASP8; KRAS; RELA; |
| | PRKCD; PRKAA1; MAPK9; CDK2; PIM1; TP53; TNF; |
| | RAF1; IKBKG; RELB; CASP9; DYRK1A; MAP2K2; |
| | CHUK; APAF1; MAP2K1; NFKB1; PAK3; LMNA; CASP2; |
| | BIRC2; TTK; CSNK1A1; BRAF; BAX; PRKCA; SGK; |
| | CASP3; BIRC3; PARP1 |
| B Cell Receptor Signaling | RAC1; PTEN; LYN; ELK1; MAPK1; RAC2; PTPN11; |
| | AKT2; IKBKB; PIK3CA; CREB1; SYK; NFKB2; CAMK2A; |
| | MAP3K14; PIK3CB; PIK3C3; MAPK8; BCL2L1; ABL1; |
| | MAPK3; ETS1; KRAS; MAPK13; RELA; PTPN6; MAPK9; |
| | EGR1; PIK3C2A; BTK; MAPK14; RAF1; IKBKG; RELB; |
| | MAP3K7; MAP2K2; AKT1; PIK3R1; CHUK; MAP2K1; |
| | NFKB1; CDC42; GSK3A; FRAP1; BCL6; BCL10; JUN; |
| | GSK3B; ATF4; AKT3; VAV3; RPS6KB1 |
| Leukocyte Extravasation | ACTN4; CD44; PRKCE; ITGAM; ROCK1; CXCR4; CYBA; |
| Signaling | RACI; RAP1A; PRKCZ; ROCK2; RAC2; PTPN11; |
| | MMP14; PIK3CA; PRKCI; PTK2; PIK3CB; CXCL12; |
| | PIK3C3; MAPK8; PRKD1; ABL1; MAPK10; CYBB; |
| | MAPK13; RHOA; PRKCD; MAPK9; SRC; PIK3C2A; BTK; |
| | MAPK14; NOX1; PXN; VIL2; VASP; ITGB1; MAP2K2; |
| | CTNND1; PIK3R1; CTNNB1; CLDN1; CDC42; F11R; ITK; |
| | CRKL; VAV3; CTTN; PRKCA; MMP1; MMP9 |
| Integrin Signaling | ACTN4; ITGAM; ROCK1; ITGA5; RAC1; PTEN; RAP1A; |
| | TLN1; ARHGEF7; MAPK1; RAC2; CAPNS1; AKT2; |
| | CAPN2; PIK3CA; PTK2; PIK3CB; PIK3C3; MAPK8; |
| | CAVI; CAPN1; ABL1; MAPK3; ITGA1; KRAS; RHOA; |
| | SRC; PIK3C2A; ITGB7; PPP1CC; ILK; PXN; VASP; |
| | RAF1; FYN; ITGB1; MAP2K2; PAK4; AKT1; PIK3R1; |
| | TNK2; MAP2K1; PAK3; ITGB3; CDC42; RND3; ITGA2; |
| | CRKL; BRAF; GSK3B; AKT3 |
| Acute Phase Response | IRAK1; SOD2; MYD88; TRAF6; ELK1; MAPK1; PTPN11; |
| Signaling | AKT2; IKBKB; PIK3CA; FOS; NFKB2; MAP3K14; |
| | PIK3CB; MAPK8; RIPK1; MAPK3; IL6ST; KRAS; |
| | MAPK13; IL6R; RELA; SOCS1; MAPK9; FTL; NR3C1; |
| | TRAF2; SERPINE1; MAPK14; TNF; RAF1; PDK1; |
| | IKBKG; RELB; MAP3K7; MAP2K2; AKT1; JAK2; PIK3R1; |
| | CHUK; STAT3; MAP2K1; NFKB1; FRAP1; CEBPB; JUN; |
| | AKT3; IL1R1; IL6 |
| PTEN Signaling | ITGAM; ITGA5; RAC1; PTEN; PRKCZ; BCL2L11; |
| | MAPK1; RAC2; AKT2; EGFR; IKBKB; CBL; PIK3CA; |
| | CDKN1B; PTK2; NFKB2; BCL2; PIK3CB; BCL2L1; |
| | MAPK3; ITGA1; KRAS; ITGB7; ILK; PDGFRB; INSR; |
| | RAF1; IKBKG; CASP9; CDKN1A; ITGB1; MAP2K2; |
| | AKT1; PIK3R1; CHUK; PDGFRA; PDPK1; MAP2K1; |
| | NFKB1; ITGB3; CDC42; CCND1; GSK3A; ITGA2; |
| | GSK3B; AKT3; FOXO1; CASP3; RPS6KB1 |
| p53 Signaling | PTEN; EP300; BBC3; PCAF; FASN; BRCA1; GADD45A; |
| Aryl Hydrocarbon Receptor | BIRC5; AKT2; PIK3CA; CHEK1; TP53INP1; BCL2; |
| | PIK3CB; PIK3C3; MAPK8; THBS1; ATR; BCL2L1; E2F1; |
| | PMAIP1; CHEK2; TNFRSF10B; TP73; RB1; HDAC9; |
| | CDK2; PIK3C2A; MAPK14; TP53; LRDD; CDKN1A; |
| | HIPK2; AKT1; PIK3R1; RRM2B; APAF1; CTNNB1; |
| | SIRT1; CCND1; PRKDC; ATM; SFN; CDKN2A; JUN; |
| | SNAI2; GSK3B; BAX; AKT3 |
| Signaling | HSPB1; EP300; FASN; TGM2; RXRA; MAPK1; NQO1; |
| | NCOR2; SP1; ARNT; CDKN1B; FOS; CHEK1; |
| | SMARCA4; NFKB2; MAPK8; ALDH1A1; ATR; E2F1; |
| | MAPK3; NRIP1; CHEK2; RELA; TP73; GSTP1; RB1; |
| | SRC; CDK2; AHR; NFE2L2; NCOA3; TP53; TNF; |
| | CDKN1A; NCOA2; APAF1; NFKB1; CCND1; ATM; ESR1; |
| | CDKN2A; MYC; JUN; ESR2; BAX; IL6; CYP1B1; |
| | HSP90AA1 |
| Xenobiotic Metabolism | PRKCE; EP300; PRKCZ; RXRA; MAPK1; NQO1; |
| Signaling | NCOR2; PIK3CA; ARNT; PRKCI; NFKB2; CAMK2A; |
| | PIK3CB; PPP2R1A; PIK3C3; MAPK8; PRKD1; |
| | ALDH1A1; MAPK3; NRIP1; KRAS; MAPK13; PRKCD; |
| | GSTP1; MAPK9; NOS2A; ABCB1; AHR; PPP2CA; FTL; |
| | NFE2L2; PIK3C2A; PPARGC1A; MAPK14; TNF; RAF1; |
| | CREBBP; MAP2K2; PIK3R1; PPP2R5C; MAP2K1; |
| | NFKB1; KEAP1; PRKCA; EIF2AK3; IL6; CYP1B1; |
| | HSP90AA1 |
| SAPK/JNK Signaling | PRKCE; IRAK1; PRKAA2; EIF2AK2; RAC1; ELK1; |
| | GRK6; MAPK1; GADD45A; RAC2; PLK1; AKT2; PIK3CA; |
| | FADD; CDK8; PIK3CB; PIK3C3; MAPK8; RIPK1; |
| | GNB2L1; IRS1; MAPK3; MAPK10; DAXX; KRAS; |
| | PRKCD; PRKAA1; MAPK9; CDK2; PIM1; PIK3C2A; |
| | TRAF2; TP53; LCK; MAP3K7; DYRK1A; MAP2K2; |
| | PIK3R1; MAP2K1; PAK3; CDC42; JUN; TTK; CSNK1A1; |
| | CRKL; BRAF; SGK |
| PPAr/RXR Signaling | PRKAA2; EP300; INS; SMAD2; TRAF6; PPARA; FASN; |
| | RXRA; MAPK1; SMAD3; GNAS; IKBKB; NCOR2; |
| | ABCA1; GNAQ; NFKB2; MAP3K14; STAT5B; MAPK8; |
| | IRS1; MAPK3; KRAS; RELA; PRKAA1; PPARGC1A; |
| | NCOA3; MAPK14; INSR; RAF1; IKBKG; RELB; MAP3K7; |
| | CREBBP; MAP2K2; JAK2; CHUK; MAP2K1; NFKB1; |
| | TGFBR1; SMAD4; JUN; IL1R1; PRKCA; IL6; HSP90AA1; |
| | ADIPOQ |
| NF-KB Signaling | IRAK1; EIF2AK2; EP300; INS; MYD88; PRKCZ; TRAF6; |
| | TBK1; AKT2; EGFR; IKBKB; PIK3CA; BTRC; NFKB2; |
| | MAP3K14; PIK3CB; PIK3C3; MAPK8; RIPK1; HDAC2; |
| | KRAS; RELA; PIK3C2A; TRAF2; TLR4; PDGFRB; TNF; |
| | INSR; LCK; IKBKG; RELB; MAP3K7; CREBBP; AKT1; |
| | PIK3R1; CHUK; PDGFRA; NFKB1; TLR2; BCL10; |
| | GSK3B; AKT3; TNFAIP3; IL1R1 |
| Neuregulin Signaling | ERBB4; PRKCE; ITGAM; ITGA5; PTEN; PRKCZ; ELK1; |
| Wnt & Beta catenin | MAPK1; PTPN11; AKT2; EGFR; ERBB2; PRKCI; |
| | CDKN1B; STAT5B; PRKD1; MAPK3; ITGA1; KRAS; |
| | PRKCD; STAT5A; SRC; ITGB7; RAF1; ITGB1; MAP2K2; |
| | ADAM17; AKT1; PIK3R1; PDPK1; MAP2K1; ITGB3; |
| | EREG; FRAP1; PSEN1; ITGA2; MYC; NRG1; CRKL; |
| | AKT3; PRKCA; HSP90AA1; RPS6KB1 |
| Signaling | CD44; EP300; LRP6; DVL3; CSNK1E; GJA1; SMO; |
| | AKT2; PIN1; CDH1; BTRC; GNAQ; MARK2; PPP2R1A; |
| | WNT11; SRC; DKK1; PPP2CA; SOX6; SFRP2; ILK; |
| | LEF1; SOX9; TP53; MAP3K7; CREBBP; TCF7L2; AKT1; |
| | PPP2R5C; WNT5A; LRP5; CTNNB1; TGFBR1; CCND1; |
| | GSK3A; DVL1; APC; CDKN2A; MYC; CSNK1A1; GSK3B; |
| | AKT3; SOX2 |
| Insulin Receptor Signaling | PTEN; INS; EIF4E; PTPN1; PRKCZ; MAPK1; TSC1; |
| | PTPN11; AKT2; CBL; PIK3CA; PRKCI; PIK3CB; PIK3C3; |
| | MAPK8; IRS1; MAPK3; TSC2; KRAS; EIF4EBP1; |
| | SLC2A4; PIK3C2A; PPP1CC; INSR; RAF1; FYN; |
| | MAP2K2; JAK1; AKT1; JAK2; PIK3R1; PDPK1; MAP2K1; |
| | GSK3A; FRAP1; CRKL; GSK3B; AKT3; FOXO1; SGK; |
| | RPS6KB1 |
| IL-6 Signaling | HSPB1; TRAF6; MAPKAPK2; ELK1; MAPK1; PTPN11; |
| | IKBKB; FOS; NFKB2; MAP3K14; MAPK8; MAPK3; |
| | MAPK10; IL6ST; KRAS; MAPK13; IL6R; RELA; SOCS1; |
| | MAPK9; ABCB1; TRAF2; MAPK14; TNF; RAF1; IKBKG; |
| | RELB; MAP3K7; MAP2K2; IL8; JAK2; CHUK; STAT3; |
| | MAP2K1; NFKB1; CEBPB; JUN; IL1R1; SRF; IL6 |
| Hepatic Cholestasis | PRKCE; IRAK1; INS; MYD88; PRKCZ; TRAF6; PPARA; |
| | RXRA; IKBKB; PRKCI; NFKB2; MAP3K14; MAPK8; |
| | PRKD1; MAPK10; RELA; PRKCD; MAPK9; ABCB1; |
| | TRAF2; TLR4; TNF; INSR; IKBKG; RELB; MAP3K7; IL8; |
| | CHUK; NR1H2; TJP2; NFKB1; ESR1; SREBF1; FGFR4; |
| | JUN; IL1R1; PRKCA; IL6 |
| IGF-1 Signaling | IGF1; PRKCZ; ELK1; MAPK1; PTPN11; NEDD4; AKT2; |
| | PIK3CA; PRKCI; PTK2; FOS; PIK3CB; PIK3C3; MAPK8; |
| | IGF1R; IRS1; MAPK3; IGFBP7; KRAS; PIK3C2A; |
| | YWHAZ; PXN; RAF1; CASP9; MAP2K2; AKT1; PIK3R1; |
| | PDPK1; MAP2K1; IGFBP2; SFN; JUN; CYR61; AKT3; |
| | FOXO1; SRF; CTGF; RPS6KB1 |
| NRF2-mediated Oxidative | PRKCE; EP300; SOD2; PRKCZ; MAPK1; SQSTM1; |
| Stress Response | NQO1; PIK3CA; PRKCI; FOS; PIK3CB; PIK3C3; MAPK8; |
| | PRKD1; MAPK3; KRAS; PRKCD; GSTP1; MAPK9; FTL; |
| | NFE2L2; PIK3C2A; MAPK14; RAF1; MAP3K7; CREBBP; |
| | MAP2K2; AKT1; PIK3R1; MAP2K1; PPIB; JUN; KEAP1; |
| | GSK3B; ATF4; PRKCA; EIF2AK3; HSP90AA1 |
| Hepatic Fibrosis/Hepatic | EDN1; IGF1; KDR; FLT1; SMAD2; FGFR1; MET; PGF; |
| Stellate Cell Activation | SMAD3; EGFR; FAS; CSF1; NFKB2; BCL2; MYH9; |
| | IGF1R; IL6R; RELA; TLR4; PDGFRB; TNF; RELB; IL8; |
| | PDGFRA; NFKB1; TGFBR1; SMAD4; VEGFA; BAX; |
| | IL1R1; CCL2; HGF; MMP1; STAT1; IL6; CTGF; MMP9 |
| PPAR Signaling | EP300; INS; TRAF6; PPARA; RXRA; MAPK1; IKBKB; |
| | NCOR2; FOS; NFKB2; MAP3K14; STAT5B; MAPK3; |
| | NRIP1; KRAS; PPARG; RELA; STAT5A; TRAF2; |
| | PPARGC1A; PDGFRB; TNF; INSR; RAF1; IKBKG; |
| | RELB; MAP3K7; CREBBP; MAP2K2; CHUK; PDGFRA; |
| | MAP2K1; NFKB1; JUN; IL1R1; HSP90AA1 |
| Fc Epsilon RI Signaling | PRKCE; RAC1; PRKCZ; LYN; MAPK1; RAC2; PTPN11; |
| | AKT2; PIK3CA; SYK; PRKCI; PIK3CB; PIK3C3; MAPK8; |
| | PRKD1; MAPK3; MAPK10; KRAS; MAPK13; PRKCD; |
| | MAPK9; PIK3C2A; BTK; MAPK14; TNF; RAF1; FYN; |
| | MAP2K2; AKT1; PIK3R1; PDPK1; MAP2K1; AKT3; |
| | VAV3; PRKCA |
| G-Protein Coupled | PRKCE; RAP1A; RGS16; MAPK1; GNAS; AKT2; IKBKB; |
| Receptor Signaling | PIK3CA; CREB1; GNAQ; NFKB2; CAMK2A; PIK3CB; |
| | PIK3C3; MAPK3; KRAS; RELA; SRC; PIK3C2A; RAF1; |
| | IKBKG; RELB; FYN; MAP2K2; AKT1; PIK3R1; CHUK; |
| | PDPK1; STAT3; MAP2K1; NFKB1; BRAF; ATF4; AKT3; |
| | PRKCA |
| Inositol Phosphate | PRKCE; IRAK1; PRKAA2; EIF2AK2; PTEN; GRK6; |
| Metabolism | MAPK1; PLK1; AKT2; PIK3CA; CDK8; PIK3CB; PIK3C3; |
| | MAPK8; MAPK3; PRKCD; PRKAA1; MAPK9; CDK2; |
| | PIM1; PIK3C2A; DYRK1A; MAP2K2; PIP5K1A; PIK3R1; |
| | MAP2K1; PAK3; ATM; TTK; CSNK1A1; BRAF; SGK |
| PDGF Signaling | EIF2AK2; ELK1; ABL2; MAPK1; PIK3CA; FOS; PIK3CB; |
| | PIK3C3; MAPK8; CAV1; ABL1; MAPK3; KRAS; SRC; |
| | PIK3C2A; PDGFRB; RAF1; MAP2K2; JAK1; JAK2; |
| | PIK3R1; PDGFRA; STAT3; SPHK1; MAP2K1; MYC; |
| | JUN; CRKL; PRKCA; SRF; STAT1; SPHK2 |
| VEGF Signaling | ACTN4; ROCK1; KDR; FLT1; ROCK2; MAPK1; PGF; |
| | AKT2; PIK3CA; ARNT; PTK2; BCL2; PIK3CB; PIK3C3; |
| | BCL2L1; MAPK3; KRAS; HIF1A; NOS3; PIK3C2A; PXN; |
| | RAF1; MAP2K2; ELAVL1; AKT1; PIK3R1; MAP2K1; SFN; |
| | VEGFA; AKT3; FOXO1; PRKCA |
| Natural Killer Cell Signaling | PRKCE; RAC1; PRKCZ; MAPK1; RAC2; PTPN11; |
| | KIR2DL3; AKT2; PIK3CA; SYK; PRKCI; PIK3CB; |
| | PIK3C3; PRKD1; MAPK3; KRAS; PRKCD; PTPN6; |
| | PIK3C2A; LCK; RAF1; FYN; MAP2K2; PAK4; AKT1; |
| | PIK3R1; MAP2K1; PAK3; AKT3; VAV3; PRKCA |
| Cell Cycle: G1/S | HDAC4; SMAD3; SUV39H1; HDAC5; CDKN1B; BTRC; |
| Checkpoint Regulation | ATR; ABL1; E2F1; HDAC2; HDAC7A; RB1; HDAC11; |
| | HDAC9; CDK2; E2F2; HDAC3; TP53; CDKN1A; CCND1; |
| | E2F4; ATM; RBL2; SMAD4; CDKN2A; MYC; NRG1; |
| | GSK3B; RBL1; HDAC6 |
| T Cell Receptor Signaling | RAC1; ELK1; MAPK1; IKBKB; CBL; PIK3CA; FOS; |
| | NFKB2; PIK3CB; PIK3C3; MAPK8; MAPK3; KRAS; |
| | RELA; PIK3C2A; BTK; LCK; RAF1; IKBKG; RELB; FYN; |
| | MAP2K2; PIK3R1; CHUK; MAP2K1; NFKB1; ITK; BCL10; |
| | JUN; VAV3 |
| Death Receptor Signaling | CRADD; HSPB1; BID; BIRC4; TBK1; IKBKB; FADD; |
| | FAS; NFKB2; BCL2; MAP3K14; MAPK8; RIPK1; CASP8; |
| | DAXX; TNFRSF10B; RELA; TRAF2; TNF; IKBKG; RELB; |
| | CASP9; CHUK; APAF1; NFKB1; CASP2; BIRC2; CASP3; |
| | BIRC3 |
| FGF Signaling | RAC1; FGFR1; MET; MAPKAPK2; MAPK1; PTPN11; |
| | AKT2; PIK3CA; CREB1; PIK3CB; PIK3C3; MAPK8; |
| | MAPK3; MAPK13; PTPN6; PIK3C2A; MAPK14; RAF1; |
| | AKT1; PIK3R1; STAT3; MAP2K1; FGFR4; CRKL; ATF4; |
| | AKT3; PRKCA; HGF |
| GM-CSF Signaling | LYN; ELK1; MAPK1; PTPN11; AKT2; PIK3CA; CAMK2A; |
| | STAT5B; PIK3CB; PIK3C3; GNB2L1; BCL2L1; MAPK3; |
| | ETS1; KRAS; RUNX1; PIM1; PIK3C2A; RAF1; MAP2K2; |
| | AKT1; JAK2; PIK3R1; STAT3; MAP2K1; CCND1; AKT3; |
| | STAT1 |
| Amyotrophic Lateral | BID; IGF1; RAC1; BIRC4; PGF; CAPNS1; CAPN2; |
| Sclerosis Signaling | PIK3CA; BCL2; PIK3CB; PIK3C3; BCL2L1; CAPN1; |
| | PIK3C2A; TP53; CASP9; PIK3R1; RAB5A; CASP1; |
| | APAF1; VEGFA; BIRC2; BAX; AKT3; CASP3; BIRC3 |
| JAK/Stat Signaling | PTPN1; MAPK1; PTPN11; AKT2; PIK3CA; STAT5B; |
| | PIK3CB; PIK3C3; MAPK3; KRAS; SOCS1; STAT5A; |
| | PTPN6; PIK3C2A; RAF1; CDKN1A; MAP2K2; JAK1; |
| | AKT1; JAK2; PIK3R1; STAT3; MAP2K1; FRAP1; AKT3; |
| | STAT1 |
| Nicotinate and Nicotinamide | PRKCE; IRAK1; PRKAA2; EIF2AK2; GRK6; MAPK1; |
| Metabolism | PLK1; AKT2; CDK8; MAPK8; MAPK3; PRKCD; PRKAA1; |
| | PBEF1; MAPK9; CDK2; PIM1; DYRK1A; MAP2K2; |
| | MAP2K1; PAK3; NT5E; TTK; CSNK1A1; BRAF; SGK |
| Chemokine Signaling | CXCR4; ROCK2; MAPK1; PTK2; FOS; CFL1; GNAQ; |
| | CAMK2A; CXCL12; MAPK8; MAPK3; KRAS; MAPK13; |
| | RHOA; CCR3; SRC; PPP1CC; MAPK14; NOX1; RAF1; |
| | MAP2K2; MAP2K1; JUN; CCL2; PRKCA |
| IL-2 Signaling | ELK1; MAPK1; PTPN11; AKT2; PIK3CA; SYK; FOS; |
| | STAT5B; PIK3CB; PIK3C3; MAPK8; MAPK3; KRAS; |
| | SOCS1; STAT5A; PIK3C2A; LCK; RAF1; MAP2K2; |
| | JAK1; AKT1; PIK3R1; MAP2K1; JUN; AKT3 |
| Synaptic Long Term | PRKCE; IGF1; PRKCZ; PRDX6; LYN; MAPK1; GNAS; |
| Depression | PRKCI; GNAQ; PPP2R1A; IGF1R; PRKD1; MAPK3; |
| | KRAS; GRN; PRKCD; NOS3; NOS2A; PPP2CA; |
| | YWHAZ; RAF1; MAP2K2; PPP2R5C; MAP2K1; PRKCA |
| Estrogen Receptor | TAF4B; EP300; CARM1; PCAF; MAPK1; NCOR2; |
| Signaling | SMARCA4; MAPK3; NRIP1; KRAS; SRC; NR3C1; |
| | HDAC3; PPARGC1A; RBM9; NCOA3; RAF1; CREBBP; |
| | MAP2K2; NCOA2; MAP2K1; PRKDC; ESR1; ESR2 |
| Protein Ubiquitination | TRAF6; SMURF1; BIRC4; BRCA1; UCHL1; NEDD4; |
| Pathway | CBL; UBE2I; BTRC; HSPA5; USP7; USP10; FBXW7; |
| | USP9X; STUB1; USP22; B2M; BIRC2; PARK2; USP8; |
| | USP1; VHL; HSP90AA1; BIRC3 |
| IL-10 Signaling | TRAF6; CCR1; ELK1; IKBKB; SP1; FOS; NFKB2; |
| | MAP3K14; MAPK8; MAPK13; RELA; MAPK14; TNF; |
| | IKBKG; RELB; MAP3K7; JAK1; CHUK; STAT3; NFKB1; |
| | JUN; IL1R1; IL6 |
| VDR/RXR Activation | PRKCE; EP300; PRKCZ; RXRA; GADD45A; HES1; |
| | NCOR2; SP1; PRKCI; CDKN1B; PRKD1; PRKCD; |
| | RUNX2; KLF4; YY1; NCOA3; CDKN1A; NCOA2; SPP1; |
| | LRP5; CEBPB; FOXO1; PRKCA |
| TGF-beta Signaling | EP300; SMAD2; SMURF1; MAPK1; SMAD3; SMAD1; |
| | FOS; MAPK8; MAPK3; KRAS; MAPK9; RUNX2; |
| | SERPINE1; RAF1; MAP3K7; CREBBP; MAP2K2; |
| | MAP2K1; TGFBR1; SMAD4; JUN; SMAD5 |
| Toll-like Receptor Signaling | IRAK1; EIF2AK2; MYD88; TRAF6; PPARA; ELK1; |
| | IKBKB; FOS; NFKB2; MAP3K14; MAPK8; MAPK13; |
| | RELA; TLR4; MAPK14; IKBKG; RELB; MAP3K7; CHUK; |
| | NFKB1; TLR2; JUN |
| p38 MAPK Signaling | HSPB1; IRAK1; TRAF6; MAPKAPK2; ELK1; FADD; FAS; |
| | CREB1; DDIT3; RPS6KA4; DAXX; MAPK13; TRAF2; |
| | MAPK14; TNF; MAP3K7; TGFBR1; MYC; ATF4; IL1R1; |
| | SRF; STAT1 |
| Neurotrophin/TRK Signaling | NTRK2; MAPK1; PTPN11; PIK3CA; CREB1; FOS; |
| | PIK3CB; PIK3C3; MAPK8; MAPK3; KRAS; PIK3C2A; |
| | RAF1; MAP2K2; AKT1; PIK3R1; PDPK1; MAP2K1; |
| | CDC42; JUN; ATF4 |
| FXR/RXR Activation | INS; PPARA; FASN; RXRA; AKT2; SDC1; MAPK8; |
| | APOB; MAPK10; PPARG; MTTP; MAPK9; PPARGC1A; |
| | TNF; CREBBP; AKT1; SREBF1; FGFR4; AKT3; FOX01 |
| Synaptic Long Term | PRKCE; RAP1A; EP300; PRKCZ; MAPK1; CREB1; |
| Potentiation | PRKCI; GNAQ; CAMK2A; PRKD1; MAPK3; KRAS; |
| | PRKCD; PPP1CC; RAF1; CREBBP; MAP2K2; MAP2K1; |
| | ATF4; PRKCA |
| Calcium Signaling | RAP1A; EP300; HDAC4; MAPK1; HDAC5; CREB1; |
| | CAMK2A; MYH9; MAPK3; HDAC2; HDAC7A; HDAC11; |
| | HDAC9; HDAC3; CREBBP; CALR; CAMKK2; ATF4; |
| | HDAC6 |
| EGF Signaling | ELK1; MAPK1; EGFR; PIK3CA; FOS; PIK3CB; PIK3C3; |
| | MAPK8; MAPK3; PIK3C2A; RAF1; JAK1; PIK3R1; |
| | STAT3; MAP2K1; JUN; PRKCA; SRF; STAT1 |
| Hypoxia Signaling in the | EDN1; PTEN; EP300; NQO1; UBE2I; CREB1; ARNT; |
| Cardiovascular System | HIF1A; SLC2A4; NOS3; TP53; LDHA; AKT1; ATM; |
| | VEGFA; JUN; ATF4; VHL; HSP90AA1 |
| LPS/IL-1 Mediated Inhibition | IRAK1; MYD88; TRAF6; PPARA; RXRA; ABCA1; |
| of RXR Function | MAPK8; ALDH1A1; GSTP1; MAPK9; ABCB1; TRAF2; |
| | TLR4; TNF; MAP3K7; NR1H2; SREBF1; JUN; IL1R1 |
| LXR/RXR Activation | FASN; RXRA; NCOR2; ABCA1; NFKB2; IRF3; RELA; |
| | NOS2A; TLR4; TNF; RELB; LDLR; NR1H2; NFKB1; |
| | SREBF1; IL1R1; CCL2; IL6; MMP9 |
| Amyloid Processing | PRKCE; CSNK1E; MAPK1; CAPNS1; AKT2; CAPN2; |
| | CAPN1; MAPK3; MAPK13; MAPT; MAPK14; AKT1; |
| | PSEN1; CSNK1A1; GSK3B; AKT3; APP |
| IL-4 Signaling | AKT2; PIK3CA; PIK3CB; PIK3C3; IRS1; KRAS; SOCS1; |
| | PTPN6; NR3C1; PIK3C2A; JAK1; AKT1; JAK2; PIK3R1; |
| | FRAP1; AKT3; RPS6KB1 |
| Cell Cycle: G2/M DNA | EP300; PCAF; BRCA1; GADD45A; PLK1; BTRC; |
| Damage Checkpoint | CHEK1; ATR; CHEK2; YWHAZ; TP53; CDKN1A; |
| Regulation | PRKDC; ATM; SFN; CDKN2A |
| Nitric Oxide Signaling in the | KDR; FLT1; PGF; AKT2; PIK3CA; PIK3CB; PIK3C3; |
| Cardiovascular System | CAV1; PRKCD; NOS3; PIK3C2A; AKT1; PIK3R1; |
| | VEGFA; AKT3; HSP90AA1 |
| Purine Metabolism | NME2; SMARCA4; MYH9; RRM2; ADAR; EIF2AK4; |
| | PKM2; ENTPD1; RAD51; RRM2B; TJP2; RAD51C; |
| | NT5E; POLD1; NME1 |
| cAMP-mediated Signaling | RAP1A; MAPK1; GNAS; CREB1; CAMK2A; MAPK3; |
| | SRC; RAF1; MAP2K2; STAT3; MAP2K1; BRAF; ATF4 |
| Mitochondrial Dysfunction | SOD2; MAPK8; CASP8; MAPK10; MAPK9; CASP9; |
| Notch Signaling | PARK7; PSEN1; PARK2; APP; CASP3 |
| | HES1; JAG1; NUMB; NOTCH4; ADAM17; NOTCH2; |
| | PSEN1; NOTCH3; NOTCH1; DLL4 |
| Endoplasmic Reticulum | HSPA5; MAPK8; XBP1; TRAF2; ATF6; CASP9; ATF4; |
| Stress Pathway | EIF2AK3; CASP3 |
| Pyrimidine Metabolism | NME2; AICDA; RRM2; EIF2AK4; ENTPD1; RRM2B; |
| | NT5E; POLD1; NME1 |
| Parkinson's Signaling | UCHL1; MAPK8; MAPK13; MAPK14; CASP9; PARK7; |
| | PARK2; CASP3 |
| Cardiac & Beta Adrenergic | GNAS; GNAQ; PPP2R1A; GNB2L1; PPP2CA; PPP1CC; |
| Signaling | PPP2R5C |
| Glycolysis/Gluconeogenesis | HK2; GCK; GPI; ALDH1A1; PKM2; LDHA; HK1 |
| Interferon Signaling | IRF1; SOCS1; JAK1; JAK2; IFITM1; STAT1; IFIT3 |
| Sonic Hedgehog Signaling | ARRB2; SMO; GLI2; DYRK1A; GLI1; GSK3B; DYRK1B |
| Glycerophospholipid | PLD1; GRN; GPAM; YWHAZ; SPHK1; SPHK2 |
| Metabolism | |
| Phospholipid Degradation | PRDX6; PLD1; GRN; YWHAZ; SPHK1; SPHK2 |
| Tryptophan Metabolism | SIAH2; PRMT5; NEDD4; ALDH1A1; CYP1B1; SIAH1 |
| Lysine Degradation | SUV39H1; EHMT2; NSD1; SETD7; PPP2R5C |
| Nucleotide Excision Repair | ERCC5; ERCC4; XPA; XPC; ERCC1 |
| Pathway | |
| Starch and Sucrose | UCHL1; HK2; GCK; GPI; HK1 |
| Metabolism | |
| Aminosugars Metabolism | NQO1; HK2; GCK; HK1 |
| Arachidonic Acid | PRDX6; GRN; YWHAZ; CYP1B1 |
| Metabolism | |
| Circadian Rhythm Signaling | CSNK1E; CREB1; ATF4; NR1D1 |
| Coagulation System | BDKRB1; F2R; SERPINE1; F3 |
| Dopamine Receptor | PPP2R1A; PPP2CA; PPP1CC; PPP2R5C |
| Signaling | |
| Glutathione Metabolism | IDH2; GSTP1; ANPEP; IDH1 |
| Glycerolipid Metabolism | ALDH1A1; GPAM; SPHK1; SPHK2 |
| Linoleic Acid Metabolism | PRDX6; GRN; YWHAZ; CYP1B1 |
| Methionine Metabolism | DNMT1; DNMT3B; AHCY; DNMT3A |
| Pyruvate Metabolism | GLO1; ALDH1A1; PKM2; LDHA |
| Arginine and Proline | ALDH1A1; NOS3; NOS2A |
| Metabolism | |
| Eicosanoid Signaling | PRDX6; GRN; YWHAZ |
| Fructose and Mannose | HK2; GCK; HK1 |
| Metabolism | |
| Galactose Metabolism | HK2; GCK; HK1 |
| Stilbene, Coumarine and | PRDX6; PRDX1; TYR |
| Lignin Biosynthesis | |
| Antigen Presentation | CALR; B2M |
| Pathway | |
| Biosynthesis of Steroids | NQO1; DHCR7 |
| Butanoate Metabolism | ALDH1A1; NLGN1 |
| Citrate Cycle | IDH2; IDH1 |
| Fatty Acid Metabolism | ALDH1A1; CYP1B1 |
| Glycerophospholipid | PRDX6; CHKA |
| Metabolism | |
| Histidine Metabolism | PRMT5; ALDH1A1 |
| Inositol Metabolism | ERO1L; APEX1 |
| Metabolism of Xenobiotics | GSTP1; CYP1B1 |
| by Cytochrome p450 | |
| Methane Metabolism | PRDX6; PRDX1 |
| Phenylalanine Metabolism | PRDX6; PRDX1 |
| Propanoate Metabolism | ALDH1A1; LDHA |
| Selenoamino Acid | PRMT5; AHCY |
| Metabolism | |
| Sphingolipid Metabolism | SPHK1; SPHK2 |
| Aminophosphonate | PRMT5 |
| Metabolism | |
| Androgen and Estrogen | PRMT5 |
| Metabolism | |
| Ascorbate and Aldarate | ALDH1A1 |
| Metabolism | |
| Bile Acid Biosynthesis | ALDH1A1 |
| Cysteine Metabolism | LDHA |
| Fatty Acid Biosynthesis | FASN |
| Glutamate Receptor | GNB2L1 |
| Signaling | |
| NRF2-mediated Oxidative | PRDX1 |
| Stress Response | |
| Pentose Phosphate | GPI |
| Pathway | |
| Pentose and Glucuronate | UCHL1 |
| Interconversions | |
| Retinol Metabolism | ALDH1A1 |
| Riboflavin Metabolism | TYR |
| Tyrosine Metabolism | PRMT5, TYR |
| Ubiquinone Biosynthesis | PRMT5 |
| Valine, Leucine and | ALDH1A1 |
| Isoleucine Degradation | |
| Glycine, Serine and | CHKA |
| Threonine Metabolism | |
| Lysine Degradation | ALDH1A1 |
| Pain/Taste | TRPM5; TRPA1 |
| Pain | TRPM7; TRPC5; TRPC6; TRPC1; Cnr1; cnr2; Grk2; |
| | Trpa1; Pomc; Cgrp; Crf; Pka; Era; Nr2b; TRPM5; Prkaca; |
| | Prkacb; Prkar1a; Prkar2a |
| Mitochondrial Function | AIF; CytC; SMAC (Diablo); Aifm-1; Aifm-2 |
| Developmental Neurology | BMP-4; Chordin (Chrd); Noggin (Nog); WNT (Wnt2; |
| | Wnt2b; Wnt3a; Wnt4; Wnt5a; Wnt6; Wnt7b; Wnt8b; |
| | Wnt9a; Wnt9b; Wnt10a; Wnt10b; Wnt16); beta-catenin; |
| | Dkk-1; Frizzled related proteins; Otx-2; Gbx2; FGF-8; |
| | Reelin; Dab1; unc-86 (Pou4fl or Brn3a); Numb; Reln |

[0589] In an aspect, the invention provides a method of individualized or personalized treatment of a genetic disease in a subject in need of such treatment comprising: (a) introducing one or more mutations ex vivo in a tissue, organ or a cell line, or in vivo in a transgenic non-human mammal, comprising delivering to cell(s) of the tissue, organ, cell or mammal a composition comprising the particle delivery system or the delivery system or the virus particle of any one of the above embodiment or the cell of any one of the above embodiment, wherein the specific mutations or precise sequence substitutions are or have been correlated to the genetic disease; (b) testing treatment(s) for the genetic disease on the cells to which the vector has been delivered that have the specific mutations or precise sequence substitutions correlated to the genetic disease; and (c) treating the subject based on results from the testing of treatment(s) of step (b).

### Infectious Diseases

[0590] In one example embodiment, the composition, system,(s) or component(s) thereof can be used to diagnose, prognose, treat, and/or prevent an infectious disease caused by a microorganism, such as bacteria, virus, fungi, parasites, or combinations thereof.

[0591] In one example embodiment, the system(s) or component(s) thereof can be capable of targeting specific microorganism within a mixed population. Exemplary methods of such techniques are described in e.g. Gomaa A A, Klumpe H E, Luo M L, Selle K, Barrangou R, Beisel C L. 2014. Programmable removal of bacterial strains by use of genome-targeting composition, systems. mBio 5:e00928-13; Citorik R J, Mimee M, Lu T K. 2014. Sequence-specific antimicrobials using efficiently delivered RNA-guided nucleases. Nat Biotechnol 32:1141-1145, the teachings of which can be adapted for use with the compositions, systems, and components thereof described herein.

[0592] In one example embodiment, the composition, system,(s) and/or components thereof can be capable of targeting pathogenic and/or drug-resistant microorganisms, such as bacteria, virus, parasites, and fungi. In one example embodiment, the composition, system,(s) and/or components thereof can be capable of targeting and modifying one or more polynucleotides in a pathogenic microorganism such that the microorganism is less virulent, killed, inhibited, or is otherwise rendered incapable of causing disease and/or infecting and/or replicating in a host cell.

[0593] In one example embodiment, the pathogenic bacteria that can be targeted and/or modified by the composition, system,(s) and/or component(s) thereof described herein include, but are not limited to, those of the genus Actinomyces (e.g. A. israelii), Bacillus (e.g. B. anthracis, B. cereus), Bactereoides (e.g. B. fragilis), Bartonella (B. henselae, B. quintana), Bordetella (B. pertussis), Borrelia (e.g. B. burgdorferi, B. garinii, B. afzelii, and B. recurreentis), Brucella (e.g. B. abortus, B. canis, B. melitensis, and B. suis), Campylobacter (e.g. C. jejuni), Chlamydia (e.g. C. pneumoniae and C. trachomatis), Chlamydophila (e.g. C. psittaci), Clostridium (e.g. C. botulinum, C. difficile, C. perfringens. C. tetani), Corynebacterium (e.g. C. diptheriae), Enterococcus (e.g. E. Faecalis, E. faecium), Ehrlichia (E. canis and E. chaffensis) Escherichia (e.g. E. coli), Francisella (e.g. F. tularensis), Haemophilus (e.g. H. influenzae), Helicobacter (H. pylori), Klebsiella (E.g. K pneumoniae), Legionella (e.g. L. pneumophila), Leptospira (e.g. L. interrogans, L. santarosai, L. weilii, L. noguchii), Listereia (e.g. L. monocytogeenes), Mycobacterium (e.g. M. leprae, M tuberculosis, M ulcerans), Mycoplasma (e.g., M pneumoniae), Neisseria (e.g., N. gonorrhoeae and N. menigitidis), Nocardia (e.g. N. asteeroides), Pseudomonas (e.g., P. aeruginosa), Rickettsia (e.g., R. rickettsia), Salmonella (e.g., S. typhi and S. typhimurium), Shigella (e.g., S. sonnei and S. dysenteriae), Staphylococcus (e.g., S. aureus, S. epidermidis, and S. saprophyticus), Streptococcus (e.g., S. agalactiaee, S. pneumoniae, S. pyogenes), Treponema (e.g., T pallidum), Ureeaplasma (e.g. U. urealyticum), Vibrio (e.g. V. cholerae), Yersinia (e.g. Y pestis, Y, enteerocolitica, and Y, pseudotuberculosis).

[0594] In one example embodiment, the pathogenic virus that can be targeted and/or modified by the composition, system,(s) and/or component(s) thereof described herein include, but are not limited to, a double-stranded DNA virus, a partly double-stranded DNA virus, a single-stranded DNA virus, a positive single-stranded RNA virus, a negative single-stranded RNA virus, or a double stranded RNA virus. In one example embodiment, the pathogenic virus can be from the family Adenoviridae (e.g. Adenovirus), Herpesviridae (e.g. Herpes simplex, type 1, Herpes simplex, type 2, Varicella-zoster virus, Epstein-Barr virus, Human cytomegalovirus, Human herpesvirus, type 8), Papillomaviridae (e.g. Human papillomavirus), Polyomaviridae (e.g. BK virus, JC virus), Poxviridae (e.g. smallpox), Hepadnaviridae (e.g. Hepatitis B), Parvoviridae (e.g. Parvovirus B19), Astroviridae (e.g. Human astrovirus), Caliciviridae (e.g. Norwalk virus), Picornaviridae (e.g. coxsackievirus, hepatitis A virus, poliovirus, rhinovirus), Coronaviridae (e.g. Severe acute respiratory syndrome-related coronavirus, strains: Severe acute respiratory syndrome virus, Severe acute respiratory syndrome coronavirus 2 (COVID-19)), Flaviviridae (e.g. Hepatitis C virus, yellow fever virus, dengue virus, West Nile virus, TBE virus), Togaviridae (e.g. Rubella virus), Hepeviridae (e.g. Hepatitis E virus), Retroviridae (Human immunodeficiency virus (HIV)), Orthomyxoviridae (e.g. Influenza virus), Arenaviridae (e.g. Lassa virus), Bunyaviridae (e.g. Crimean-Congo hemorrhagic fever virus, Hantaan virus), Filoviridae (e.g. Ebola virus and Marburg virus), Paramyxoviridae (e.g. Measles virus, Mumps virus, Parainfluenza virus, Respiratory syncytial virus), Rhabdoviridae (Rabies virus), Hepatitis D virus, Reoviridae (e.g. Rotavirus, Orbivirus, Coltivirus, Banna virus).

[0595] In one example embodiment, the pathogenic fungi that can be targeted and/or modified by the composition, system,(s) and/or component(s) thereof described herein include, but are not limited to, those of the genus Candida (e.g. C. albicans), Aspergillus (e.g. A. fumigatus, A. flavus, A. clavatus), Cryptococcus (e.g. C. neoformans, C. gattii), Histoplasma (H. capsulatum), Pneumocystis (e.g. P. jiroveecii), Stachybotrys (e.g. S. chartarum).

[0596] In one example embodiment, the pathogenic parasites that can be targeted and/or modified by the composition, system,(s) and/or component(s) thereof described herein include, but are not limited to, protozoa, helminths, and ectoparasites. In one example embodiment, the pathogenic protozoa that can be targeted and/or modified by the composition, system,(s) and/or component(s) thereof described herein include, but are not limited to, those from the groups Sarcodina (e.g. ameba such as Entamoeba), Mastigophora (e.g. flagellates such as Giardia and Leishmania), Cilophora (e.g. ciliates such as Balantidum), acholeraezoa (e.g. plasmodium and cryptosporidium). In one example embodiment, the pathogenic helminths that can be targeted and/or modified by the composition, system,(s) and/or component(s) thereof described herein include, but are not limited to, flatworms (platyhelminths), thorny-headed worms (acanthoceephalins), and roundworms (nematodes). In one example embodiment, the pathogenic ectoparasites that can be targeted and/or modified by the composition, system,(s) and/or component(s) thereof described herein include, but are not limited to, ticks, fleas, lice, and mites.

[0597] In one example embodiment, the pathogenic parasite that can be targeted and/or modified by the composition, system,(s) and/or component(s) thereof described herein include, but are not limited to, Acanthamoeba spp., Balamuthia mandrillaris, Babesiosis spp. (e.g. Babesia B. divergens, B. bigemina, B. equi, B. microfti, B. duncani), Balantidiasis spp. (e.g. Balantidium coli), Blastocystis spp., Cryptosporidium spp., Cyclosporiasis spp. (e.g. Cyclospora cayetanensis), Dientamoebiasis spp. (e.g. Dientamoeba fragilis), Amoebiasis spp. (e.g. Entamoeba histolytica), Giardiasis spp. (e.g. Giardia lamblia), Isosporiasis spp. (e.g. Isospora belli), Leishmania spp., Naegleria spp. (e.g. Naegleria fowleri), Plasmodium spp. (e.g. Plasmodium falciparum, Plasmodium vivax, Plasmodium ovale curtisi, Plasmodium ovale wallikeri, Plasmodium malariae, Plasmodium knowlesi), Rhinosporidiosis spp. (e.g. Rhinosporidium seeberi), Sarcocystosis spp. (e.g. Sarcocystis bovihominis, Sarcocystis suihominis), Toxoplasma spp. (e.g. Toxoplasma gondii), Trichomonas spp. (e.g. Trichomonas vaginalis), Trypanosoma spp. (e.g. Trypanosoma brucei), Trypanosoma spp. (e.g. Trypanosoma cruzi), Tapeworm (e.g. Cestoda, Taenia multiceps, Taenia saginata, Taenia solium), Diphyllobothrium latum spp., Echinococcus spp. (e.g. Echinococcus granulosus, Echinococcus multilocularis, E. vogeli, E. oligarthrus), Hymenolepis spp. (e.g. Hymenolepis nana, Hymenolepis diminuta), Bertiella spp. (e.g. Bertiella Cholerae, Bertiella studeri), Spirometra (e.g. Spirometra erinaceieuropaei), Clonorchis spp. (e.g. Clonorchis sinensis; Clonorchis choleraecini), Dicrocoelium spp. (e.g. Dicrocoelium dendriticum), Fasciola spp. (e.g. Fasciola hepatica, Fasciola gigantica), Fasciolopsis spp. (e.g. Fasciolopsis buski), Metagonimus spp. (e.g. Metagonimus yokogawai), Metorchis spp. (e.g. Metorchis conjunctus), Opisthorchis spp. (e.g. Opisthorch choleraecini, Opisthorchis felineus), Clonorchis spp. (e.g. Clonorchis sinensis), Paragonimus spp. (e.g. Paragonimus westermani; Paragonimus africanus; Paragonimus caliensis; Paragonimus kellicotti; Paragonimus skijabini; Paragonimus uterobilateralis), Schistosoma sp., Schistosoma spp. (e.g. Schistosoma mansoni, Schistosoma haematobium, Schistosoma japonicum, Schistosoma mekongi, and Schistosoma intercalatum), Echinostoma spp. (e.g. E. echinatum), Trichobilharzia spp. (e.g. Trichobilharzia regent), Ancylostoma spp. (e.g. Ancylostoma duodenale), Necator spp. (e.g. Necator americanus), Angiostrongylus spp., Anisakis spp., Ascaris spp. (e.g. Ascaris lumbricoides), Baylisascaris spp. (e.g. Baylisascaris procyonis), Brugia spp. (e.g. Brugia malayi, Brugia timori), Dioctophyme spp. (e.g. Dioctophyme renale), Dracunculus spp. (e.g. Dracunculus medinensis), Enterobius spp. (e.g. Enterobius vermicularis, Enterobius gregorii), Gnathostoma spp. (e.g. Gnathostoma spinigerum, Gnathostoma hi spidum), Halicephalobus spp. (e.g. Halicephalobus gingivalis), Loa loa spp. (e.g. Loa loa filaria), Mansonella spp. (e.g. Mansonella streptocerca), Onchocerca spp. (e.g. Onchocerca volvulus), Strongyloides spp. (e.g. Strongyloides stercoralis), Thelazia spp. (e.g. Thelazia californiensis, Thelazia callipaeda), Toxocara spp. (e.g. Toxocara canis, Toxocara cati, Toxascaris leonine), Trichinella spp. (e.g. Trichinella spiralis, Trichinella britovi, Trichinel Choleroni, Trichinella nativa), Trichuris spp. (e.g. Trichuris trichiura, Trichuris vulpis), Wuchereria spp. (e.g. Wuchereria bancrofti), Dermatobia spp. (e.g. Dermatobia hominis), Tunga spp. (e.g. Tunga penetrans), Cochliomyia spp. (e.g. Cochliomyia hominivorax), Linguatula spp. (e.g. Linguatula serrata), Archiacanthocephala sp., Moniliformis sp. (e.g. Moniliformis moniliformis), Pediculus spp. (e.g. Pediculus humanus capitis, Pediculus humanus humanus), Pthirus spp. (e.g. Pthirus pubis), Arachnida spp. (e.g. Trombiculidae, Ixodidae, Argaside), Siphonaptera spp (e.g. Siphonaptera: Pulicinae), Cimicidae spp. (e.g. Cimex lectularius and Cimex hemipterus), Diptera spp., Demodex spp. (e.g. Demodex folliculorum/brevis/canis), Sarcoptes spp. (e.g. Sarcoptes scabiei), Dermanyssus spp. (e.g. Dermanyssus gallinae), Ornithonyssus spp. (e.g. Ornithonyssus sylviarum, Ornithonyssus bursa, Ornithonyssus bacoti), Laelaps spp. (e.g. Laelaps echidnina), Liponyssoides spp. (e.g. Liponyssoides sanguineus).

[0598] In one example embodiment, the gene targets can be any of those as set forth in Table 1 of Strich and Chertow. 2019. J. Clin. Microbio. 57:4 e01307-18, which is incorporated herein as if expressed in its entirety herein.

[0599] In one example embodiment, the method can include delivering a composition, system, and/or component thereof to a pathogenic organism described herein, allowing the composition, system, and/or component thereof to specifically bind and modify one or more targets in the pathogenic organism, whereby the modification kills, inhibits, reduces the pathogenicity of the pathogenic organism, or otherwise renders the pathogenic organism non-pathogenic. In one example embodiment, delivery of the composition, system, occurs in vivo (i.e. in the subject being treated). In one example embodiment occurs by an intermediary, such as microorganism or phage that is non-pathogenic to the subject but is capable of transferring polynucleotides and/or infecting the pathogenic microorganism. In one example embodiment, the intermediary microorganism can be an engineered bacteria, virus, or phage that contains the composition, system,(s) and/or component(s) thereof and/or CRISPR-Cas vectors and/or vector systems. The method can include administering an intermediary microorganism containing the composition, system,(s) and/or component(s) thereof and/or CRISPR-Cas vectors and/or vector systems to the subject to be treated. The intermediary microorganism can then produce the CRISPR-system and/or component thereof or transfer a composition, system, polynucleotide to the pathogenic organism. In embodiments, where the CRISPR-system and/or component thereof, vector, or vector system is transferred to the pathogenic microorganism, the composition, system, or component thereof is then produced in the pathogenic microorganism and modifies the pathogenic microorganism such that it is less virulent, killed, inhibited, or is otherwise rendered incapable of causing disease and/or infecting and/or replicating in a host or cell thereof.

[0600] In one example embodiment, where the pathogenic microorganism inserts its genetic material into the host cell's genome (e.g. a virus), the composition, system can be designed such that it modifies the host cell's genome such that the viral DNA or cDNA cannot be replicated by the host cell's machinery into a functional virus. In one example embodiment, where the pathogenic microorganism inserts its genetic material into the host cell's genome (e.g. a virus), the composition, system, can be designed such that it modifies the host cell's genome such that the viral DNA or cDNA is deleted from the host cell's genome.

[0601] It will be appreciated that inhibiting or killing the pathogenic microorganism, the disease and/or condition that its infection causes in the subject can be treated or prevented. Thus, also provided herein are methods of treating and/or preventing one or more diseases or symptoms thereof caused by any one or more pathogenic microorganisms, such as any of those described herein.

### Mitochondrial Diseases

[0602] Some of the most challenging mitochondrial disorders arise from mutations in mitochondrial DNA (mtDNA), a high copy number genome that is maternally inherited. In one example embodiment, mtDNA mutations can be modified using a composition, system, described herein. In one example embodiment, the mitochondrial disease that can be diagnosed, prognosed, treated, and/or prevented can be MELAS (mitochondrial myopathy encephalopathy, and lactic acidosis and stroke-like episodes), CPEO/PEO (chronic progressive external ophthalmoplegia syndrome/progressive external ophthalmoplegia), KSS (Kearns-Sayre syndrome), MIDD (maternally inherited diabetes and deafness), MERRF (myoclonic epilepsy associated with ragged red fibers), NIDDM (noninsulin-dependent diabetes mellitus), LHON (Leber hereditary optic neuropathy), LS (Leigh Syndrome) an aminoglycoside induced hearing disorder, NARP (neuropathy, ataxia, and pigmentary retinopathy), Extrapyramidal disorder with akinesia-rigidity, psychosis and SNHL, Nonsyndromic hearing loss a cardiomyopathy, an encephalomyopathy, Pearson's syndrome, or a combination thereof.

[0603] In one example embodiment, the mtDNA of a subject can be modified in vivo or ex vivo. In one example embodiment, where the mtDNA is modified ex vivo, after modification the cells containing the modified mitochondria can be administered back to the subject. In one example embodiment, the composition, system, or component thereof can be capable of correcting an mtDNA mutation, or a combination thereof.

[0604] In one example embodiment, at least one of the one or more mtDNA mutations is selected from the group consisting of: A3243G, C3256T, T3271C, G1019A, A1304T, A15533G, C1494T, C4467A, T1658C, G12315A, A3421G, A8344G, T8356C, G8363A, A13042T, T3200C, G3242A, A3252G, T3264C, G3316A, T3394C, T14577C, A4833G, G3460A, G9804A, G11778A, G14459A, A14484G, G15257A, T8993C, T8993G, G10197A, G13513A, T1095C, C1494T, A1555G, G1541A, C1634T, A3260G, A4269G, T7587C, A8296G, A8348G, G8363A, T9957C, T9997C, G12192A, C12297T, A14484G, G15059A, duplication of CCCCCTCCCC-tandem repeats at positions 305-314 and/or 956-965, deletion at positions from 8,469-13,447, 4,308-14,874, and/or 4,398-14,822, 961ins/delC, the mitochondrial common deletion (e.g. mtDNA 4,977 bp deletion), and combinations thereof.

[0605] In one example embodiment, the mitochondrial mutation can be any mutation as set forth in or as identified by use of one or more bioinformatic tools available at Mitomap available at mitomap.org. Such tools include, but are not limited to, “Variant Search, aka Market Finder”, Find Sequences for Any Haplogroup, aka “Sequence Finder”, “Variant Info”, “POLG Pathogenicity Prediction Server”, “MITOMASTER”, “Allele Search”, “Sequence and Variant Downloads”, “Data Downloads”. MitoMap contains reports of mutations in mtDNA that can be associated with disease and maintains a database of reported mitochondrial DNA Base Substitution Diseases: rRNA/tRNA mutations.

[0606] In one example embodiment, the method includes delivering a composition, system, and/or a component thereof to a cell, and more specifically one or more mitochondria in a cell, allowing the composition, system, and/or component thereof to modify one or more target polynucleotides in the cell, and more specifically one or more mitochondria in the cell. The target polynucleotides can correspond to a mutation in the mtDNA, such as any one or more of those described herein. In one example embodiment, the modification can alter a function of the mitochondria such that the mitochondria functions normally or at least is/are less dysfunctional as compared to an unmodified mitochondria. Modification can occur in vivo or ex vivo. Where modification is performed ex vivo, cells containing modified mitochondria can be administered to a subject in need thereof in an autologous or allogenic manner.

### Microbiome Modification

[0607] Microbiomes play important roles in health and disease. For example, the gut microbiome can play a role in health by controlling digestion, preventing growth of pathogenic microorganisms and have been suggested to influence mood and emotion. Imbalanced microbiomes can promote disease and are suggested to contribute to weight gain, unregulated blood sugar, high cholesterol, cancer, and other disorders. A healthy microbiome has a series of joint characteristics that can be distinguished from non-healthy individuals, thus detection and identification of the disease-associated microbiome can be used to diagnose and detect disease in an individual. The compositions, systems, and components thereof can be used to screen the microbiome cell population and be used to identify a disease associated microbiome. Cell screening methods utilizing compositions, systems, and components thereof are described elsewhere herein and can be applied to screening a microbiome, such as a gut, skin, vagina, and/or oral microbiome, of a subject.

[0608] In one example embodiment, the microbe population of a microbiome in a subject can be modified using a composition, system, and/or component thereof described herein. In one example embodiment, the composition, system, and/or component thereof can be used to identify and select one or more cell types in the microbiome and remove them from the microbiome population. Exemplary methods of selecting cells using a composition, system, and/or component thereof are described elsewhere herein. In this way the make-up or microorganism profile of the microbiome can be altered. In one example embodiment, the alteration causes a change from a diseased microbiome composition to a healthy microbiome composition. In this way the ratio of one type or species of microorganism to another can be modified, such as going from a diseased ratio to a healthy ratio. In one example embodiment, the cells selected are pathogenic microorganisms.

[0609] In one example embodiment, the compositions, systems, described herein can be used to modify a polynucleotide in a microorganism of a microbiome in a subject. In one example embodiment, the microorganism is a pathogenic microorganism. In one example embodiment, the microorganism is a commensal and non-pathogenic microorganism. Methods of modifying polynucleotides in a cell in the subject are described elsewhere herein and can be applied to these embodiments.

### Adoptive Therapy

[0610] The compositions, systems, and components thereof described herein can be used to modify cells for an adoptive cell therapy. In an aspect of the invention, methods and compositions which involve editing a target nucleic acid sequence, or modulating expression of a target nucleic acid sequence, and applications thereof in connection with cancer immunotherapy are comprehended by adapting the composition, system, of the present invention.

[0611] As used herein, “ACT”, “adoptive cell therapy” and “adoptive cell transfer” may be used interchangeably. In certain embodiments, Adoptive cell therapy (ACT) can refer to the transfer of cells to a patient with the goal of transferring the functionality and characteristics into the new host by engraftment of the cells (see, e.g., Mettananda et al., Editing an α-globin enhancer in primary human hematopoietic stem cells as a treatment for β-thalassemia, Nat Commun. 2017 Sep. 4; 8(1):424). As used herein, the term “engraftment” refers to the process of cell incorporation into a tissue of interest in vivo through contact with existing cells of the tissue. Adoptive cell therapy (ACT) can refer to the transfer of cells, most commonly immune-derived cells, back into the same patient or into a new recipient host with the goal of transferring the immunologic functionality and characteristics into the new host. If possible, use of autologous cells helps the recipient by minimizing GVHD issues. The adoptive transfer of autologous tumor infiltrating lymphocytes (TIL) (Zacharakis et al., (2018) Nat Med. 2018 Jun;24(6):724-730; Besser et al., (2010) Clin. Cancer Res 16 (9) 2646-55; Dudley et al., (2002) Science 298 (5594): 850-4; and Dudley et al., (2005) Journal of Clinical Oncology 23 (10): 2346-57.) or genetically re-directed peripheral blood mononuclear cells (Johnson et al., (2009) Blood 114 (3): 535-46; and Morgan et al., (2006) Science 314(5796) 126-9) has been used to successfully treat patients with advanced solid tumors, including melanoma, metastatic breast cancer and colorectal carcinoma, as well as patients with CD19-expressing hematologic malignancies (Kalos et al., (2011) Science Translational Medicine 3 (95): 95ra73). In certain embodiments, allogenic cells immune cells are transferred (see, e.g., Ren et al., (2017) Clin Cancer Res 23 (9) 2255-2266). As described further herein, allogenic cells can be edited to reduce alloreactivity and prevent graft-versus-host disease. Thus, use of allogenic cells allows for cells to be obtained from healthy donors and prepared for use in patients as opposed to preparing autologous cells from a patient after diagnosis.

[0612] Aspects of the invention involve the adoptive transfer of immune system cells, such as T cells, specific for selected antigens, such as tumor associated antigens or tumor specific neoantigens (see, e.g., Maus et al., 2014, Adoptive Immunotherapy for Cancer or Viruses, Annual Review of Immunology, Vol. 32: 189-225; Rosenberg and Restifo, 2015, Adoptive cell transfer as personalized immunotherapy for human cancer, Science Vol. 348 no. 6230 pp. 62-68; Restifo et al., 2015, Adoptive immunotherapy for cancer: harnessing the T cell response. Nat. Rev. Immunol. 12(4): 269-281; and Jenson and Riddell, 2014, Design and implementation of adoptive therapy with chimeric antigen receptor-modified T cells. Immunol Rev. 257(1): 127-144; and Rajasagi et al., 2014, Systematic identification of personal tumor-specific neoantigens in chronic lymphocytic leukemia. Blood. 2014 Jul. 17; 124(3):453-62).

[0613] In certain embodiments, an antigen (such as a tumor antigen) to be targeted in adoptive cell therapy (such as particularly CAR or TCR T-cell therapy) of a disease (such as particularly of tumor or cancer) may be selected from a group consisting of: MR1 (see, e.g., Crowther, et al., 2020, Genome-wide CRISPR-Cas9 screening reveals ubiquitous T cell cancer targeting via the monomorphic MHC class I-related protein MR1, Nature Immunology volume 21, pages178-185), B cell maturation antigen (BCMA) (see, e.g., Friedman et al., Effective Targeting of Multiple BCMA-Expressing Hematological Malignancies by Anti-BCMA CAR T Cells, Hum Gene Ther. 2018 Mar. 8; Berdej a J G, et al. Durable clinical responses in heavily pretreated patients with relapsed/refractory multiple myeloma: updated results from a multicenter study of bb2121 anti-Bcma CAR T cell therapy. Blood. 2017; 130:740; and Mouhieddine and Ghobrial, Immunotherapy in Multiple Myeloma: The Era of CAR T Cell Therapy, Hematologist, May-June 2018, Volume 15, issue 3); PSA (prostate-specific antigen); prostate-specific membrane antigen (PSMA); PSCA (Prostate stem cell antigen); Tyrosine-protein kinase transmembrane receptor ROR1; fibroblast activation protein (FAP); Tumor-associated glycoprotein 72 (TAG72); Carcinoembryonic antigen (CEA); Epithelial cell adhesion molecule (EPCAM); Mesothelin; Human Epidermal growth factor Receptor 2 (ERBB2 (Her2/neu)); Prostate; Prostatic acid phosphatase (PAP); elongation factor 2 mutant (ELF2M); Insulin-like growth factor 1 receptor (IGF-1R); gp100; BCR-ABL (breakpoint cluster region-Abelson); tyrosinase; New York esophageal squamous cell carcinoma 1 (NY-ESO-1); x-light chain, LAGE (L antigen); MAGE (melanoma antigen); Melanoma-associated antigen 1 (MAGE-A1); MAGE A3; MAGE A6; legumain; Human papillomavirus (HPV) E6; HPV E7; prosteicholeraecvin; PCTA1 (Galectin 8); Melan-A/MART-1; Ras mutant; TRP-1 (tyrosinase related protein 1, or gp75); Tyrosinase-related Protein 2 (TRP2); TRP-2/INT2 (TRP-2/intron 2); RAGE (renal antigen); receptor for advanced glycation end products 1 (RAGE1); Renal ubiquitous 1, 2 (RU1, RU2); intestinal carboxyl esterase (iCE); Heat shock protein 70-2 (HSP70-2) mutant; thyroid stimulating hormone receptor (TSHR); CD123; CD171; CD19; CD20; CD22; CD26; CD30; CD33; CD44v7/8 (cluster of differentiation 44, exons 7/8); CD53; CD92; CD100; CD148; CD150; CD200; CD261; CD262; CD362; CS-1 (CD2 subset 1, CRACC, SLAMF7, CD319, and 19A24); C-type lectin-like molecule-1 (CLL-1); ganglioside GD3 (aNeu5Ac(2-8)aNeu5Ac(2-3)bDGalp(1-4)bDG1cp(1-1)Cer); Tn antigen (Tn Ag); Fms-Like Tyrosine Kinase 3 (FLT3); CD38; CD138; CD44v6; B7H3 (CD276); KIT (CD117); Interleukin-13 receptor subunit alpha-2 (IL-13Ra2); Interleukin 11 receptor alpha (IL-11Ra); prostate stem cell antigen (PSCA); Protease Serine 21 (PRSS21); vascular endothelial growth factor receptor 2 (VEGFR2); Lewis(Y) antigen; CD24; Platelet-derived growth factor receptor beta (PDGFR-beta); stage-specific embryonic antigen-4 (SSEA-4); Mucin 1, cell surface associated (MUC1); mucin 16 (MUC16); epidermal growth factor receptor (EGFR); epidermal growth factor receptor variant III (EGFRvIII); neural cell adhesion molecule (NCAM); carbonic anhydrase IX (CAIX); Proteasome (Prosome, Macropain) Subunit, Beta Type, 9 (LMP2); ephrin type-A receptor 2 (EphA2); Ephrin B2; Fucosyl GM1; sialyl Lewis adhesion molecule (sLe); ganglioside GM3 (aNeu5Ac(2-3)bDGalp(1-4)bDG1cp(1-1)Cer); TGS5; high molecular weight-melanoma-associated antigen (HMWMAA); o-acetyl-GD2 ganglioside (OAcGD2); Folate receptor alpha; Folate receptor beta; tumor endothelial marker 1 (TEM1/CD248); tumor endothelial marker 7-related (TEM7R); claudin 6 (CLDN6); G protein-coupled receptor class C group 5, member D (GPRC5D); chromosome X open reading frame 61 (CXORF61); CD97; CD179a; anaplastic lymphoma kinase (ALK); Polysialic acid; placenta-specific 1 (PLAC1); hexasaccharide portion of globoH glycoceramide (GloboH); mammary gland differentiation antigen (NY-BR-1); uroplakin 2 (UPK2); Hepatitis A virus cellular receptor 1 (HAVCR1); adrenoceptor beta 3 (ADRB3); pannexin 3 (PANX3); G protein-coupled receptor 20 (GPR20); lymphocyte antigen 6 complex, locus K 9 (LY6K); Olfactory receptor 51E2 (OR51E2); TCR Gamma Alternate Reading Frame Protein (TARP); Wilms tumor protein (WT1); ETS translocation-variant gene 6, located on chromosome 12p (ETV6-AML); sperm protein 17 (SPA17); X Antigen Family, Member IA (XAGE1); angiopoietin-binding cell surface receptor 2 (Tie 2); CT (cancer/testis (antigen)); melanoma cancer testis antigen-1 (MAD-CT-1); melanoma cancer testis antigen-2 (MAD-CT-2); Fos-related antigen 1; p53; p53 mutant; human Telomerase reverse transcriptase (hTERT); sarcoma translocation breakpoints; melanoma inhibitor of apoptosis (ML-IAP); ERG (transmembrane protease, serine 2 (TMPRSS2) ETS fusion gene); N-Acetyl glucosaminyl-transferase V (NA17); paired box protein Pax-3 (PAX3); Androgen receptor; Cyclin B1; Cyclin D1; v-myc avian myelocytomatosis viral oncogene neuroblastoma derived homolog (MYCN); Ras Homolog Family Member C (RhoC); Cytochrome P450 1B1 (CYP1B1); CCCTC-Binding Factor (Zinc Finger Protein)-Like (BORIS); Squamous Cell Carcinoma Antigen Recognized By T Cells-1 or 3 (SART1, SART3); Paired box protein Pax-5 (PAXS); proacrosin binding protein sp32 (OY-TES1); lymphocyte-specific protein tyrosine kinase (LCK); A kinase anchor protein 4 (AKAP-4); synovial sarcoma, X breakpoint-1, -2, -3 or -4 (SSX1, SSX2, SSX3, SSX4); CD79a; CD79b; CD72; Leukocyte-associated immunoglobulin-like receptor 1 (LAIR1); Fc fragment of IgA receptor (FCAR); Leukocyte immunoglobulin-like receptor subfamily A member 2 (LILRA2); CD300 molecule-like family member f (CD300LF); C-type lectin domain family 12 member A (CLEC12A); bone marrow stromal cell antigen 2 (BST2); EGF-like module-containing mucin-like hormone receptor-like 2 (EMR2); lymphocyte antigen 75 (LY75); Glypican-3 (GPC3); Fc receptor-like 5 (FCRLS); mouse double minute 2 homolog (MDM2); livin; alphafetoprotein (AFP); transmembrane activator and CAML Interactor (TACI); B-cell activating factor receptor (BAFF-R); V-Ki-ras2 Kirsten rat sarcoma viral oncogene homolog (KRAS); immunoglobulin lambda-like polypeptide 1 (IGLL1); 707-AP (707 alanine proline); ART-4 (adenocarcinoma antigen recognized by T4 cells); BAGE (B antigen; b-catenin/m, b-catenin/mutated); CAMEL (CTL-recognized antigen on melanoma); CAP1 (carcinoembryonic antigen peptide 1); CASP-8 (caspase-8); CDC27m (cell-division cycle 27 mutated); CDK4/m (cycline-dependent kinase 4 mutated); Cyp-B (cyclophilin B); DAM (differentiation antigen melanoma); EGP-2 (epithelial glycoprotein 2); EGP-40 (epithelial glycoprotein 40); Erbb2, 3, 4 (erythroblastic leukemia viral oncogene homolog-2, -3, 4); FBP (folate binding protein); fAchR (Fetal acetylcholine receptor); G250 (glycoprotein 250); GAGE (G antigen); GnT-V (N-acetylglucosaminyltransferase V); HAG272holeraeose antigen); ULA-A (human leukocyte antigen-A); HST2 (human signet ring tumor 2); KIAA0205; KDR (kinase insert domain receptor); LDLR/FUT (low density lipid receptor/GDP L-fucose: b-D-galactosidase 2-a-L fucosyltransferase); L1CAM (L1 cell adhesion molecule); MC1R (melanocortin 1 receptor); Myosin/m (myosin mutated); MUM-1, -2, -3 (melanoma ubiquitous mutated 1, 2, 3); NA88-A (NA cDNA clone of patient M88); KG2D (Natural killer group 2, member D) ligands; oncofetal antigen (h5T4); p190 minor bcr-abl (protein of 190KD bcr-abl); Pml/RARa (promyelocytic leukaemia/retinoic acid receptor a); PRAME (preferentially expressed antigen of melanoma); SAGE (sarcoma antigen); TEL/AML1 (translocation Ets-family leukemia/acute myeloid leukemia 1); TPI/m (triosephosphate isomerase mutated); CD70; and any combination thereof.

[0614] In certain embodiments, an antigen to be targeted in adoptive cell therapy (such as particularly CAR or TCR T-cell therapy) of a disease (such as particularly of tumor or cancer) is a tumor-specific antigen (TSA).

[0615] In certain embodiments, an antigen to be targeted in adoptive cell therapy (such as particularly CAR or TCR T-cell therapy) of a disease (such as particularly of tumor or cancer) is a neoantigen.

[0616] In certain embodiments, an antigen to be targeted in adoptive cell therapy (such as particularly CAR or TCR T-cell therapy) of a disease (such as particularly of tumor or cancer) is a tumor-associated antigen (TAA).

[0617] In certain embodiments, an antigen to be targeted in adoptive cell therapy (such as particularly CAR or TCR T-cell therapy) of a disease (such as particularly of tumor or cancer) is a universal tumor antigen. In certain preferred embodiments, the universal tumor antigen is selected from the group consisting of: a human telomerase reverse transcriptase (hTERT Choleraecvin, mouse double minute 2 homolog (MDM2), cytochrome P450 1B 1 (CYP1B), HER2/neu, Wi′ms′ tumor gene 1 (WT1), livin, alphafetoprotein (AFP), carcinoembryonic antigen (CEA), mucin 16 (MUC16), MUC1, prostate-specific membrane antigen (PSMA), p53, cyclin (Dl), and any combinations thereof.

[0618] In certain embodiments, an antigen (such as a tumor antigen) to be targeted in adoptive cell therapy (such as particularly CAR or TCR T-cell therapy) of a disease (such as particularly of tumor or cancer) may be selected from a group consisting of: CD19, BCMA, CD70, CLL-1, MAGE A3, MAGE A6, HPV E6, HPV E7, WT1, CD22, CD171, ROR1, MUC16, and SSX2. In certain preferred embodiments, the antigen may be CD19. For example, CD19 may be targeted in hematologic malignancies, such as in lymphomas, more particularly in B-cell lymphomas, such as without limitation in diffuse large B-cell lymphoma, primary mediastinal b-cell lymphoma, transformed follicular lymphoma, marginal zone lymphoma, mantle cell lymphoma, acute lymphoblastic leukemia including adult and pediatric ALL, non-Hodgkin lymphoma, indolent non-Hodgkin lymphoma, or chronic lymphocytic leukemia. For example, BCMA may be targeted in multiple myeloma or plasma cell leukemia (see, e.g., 2018 American Association for Cancer Research (AACR) Annual meeting Poster: Allogeneic Chimeric Antigen Receptor T Cells Targeting B Cell Maturation Antigen). For example, CLL1 may be targeted in acute myeloid leukemia. For example, MAGE A3, MAGE A6, SSX2, and/or KRAS may be targeted in solid tumors. For example, HPV E6 and/or HPV E7 may be targeted in cervical cancer or head and neck cancer. For example, WT1 may be targeted in acute myeloid leukemia (AML), myelodysplastic syndromes (MDS), chronic myeloid leukemia (CIVIL), non-small cell lung cancer, breast, pancreatic, ovarian or colorectal cancers, or mesothelioma. For example, CD22 may be targeted in B cell malignancies, including non-Hodgkin lymphoma, diffuse large B-cell lymphoma, or acute lymphoblastic leukemia. For example, CD171 may be targeted in neuroblastoma, glioblastoma, or lung, pancreatic, or ovarian cancers. For example, ROR1 may be targeted in ROR1+malignancies, including non-small cell lung cancer, triple negative breast cancer, pancreatic cancer, prostate cancer, ALL, chronic lymphocytic leukemia, or mantle cell lymphoma. For example, MUC16 may be targeted in MUC16ecto+epithelial ovarian, fallopian tube or primary peritoneal cancer. For example, CD70 may be targeted in both hematologic malignancies as well as in solid cancers such as renal cell carcinoma (RCC), gliomas (e.g., GBM), and head and neck cancers (HNSCC). CD70 is expressed in both hematologic malignancies as well as in solid cancers, while its expression in normal tissues is restricted to a subset of lymphoid cell types (see, e.g., 2018 American Association for Cancer Research (AACR) Annual meeting Poster: Allogeneic CRISPR Engineered Anti-CD70 CAR-T Cells Demonstrate Potent Preclinical Activity Against Both Solid and Hematological Cancer Cells).

[0619] Various strategies may for example be employed to genetically modify T cells by altering the specificity of the T cell receptor (TCR) for example by introducing new TCR a and t chains with selected peptide specificity (see U.S. Pat. No. 8,697,854; PCT Patent Publications: WO2003020763, WO2004033685, WO2004044004, WO2005114215, WO2006000830, WO2008038002, WO2008039818, WO2004074322, WO2005113595, WO2006125962, WO2013166321, WO2013039889, WO2014018863, WO2014083173; U.S. Pat. No. 8,088,379).

[0620] As an alternative to, or addition to, TCR modifications, chimeric antigen receptors (CARs) may be used in order to generate immunoresponsive cells, such as T cells, specific for selected targets, such as malignant cells, with a wide variety of receptor chimera constructs having been described (see U.S. Pat. Nos. 5,843,728; 5,851,828; 5,912,170; 6,004,811; 6,284,240; 6,392,013; 6,410,014; 6,753,162; 8,211,422; and, PCT Publication WO9215322).

[0621] In general, CARs are comprised of an extracellular domain, a transmembrane domain, and an intracellular domain, wherein the extracellular domain comprises an antigen-binding domain that is specific for a predetermined target. While the antigen-binding domain of a CAR is often an antibody or antibody fragment (e.g., a single chain variable fragment, scFv), the binding domain is not particularly limited so long as it results in specific recognition of a target. For example, in one example embodiment, the antigen-binding domain may comprise a receptor, such that the CAR is capable of binding to the ligand of the receptor. Alternatively, the antigen-binding domain may comprise a ligand, such that the CAR is capable of binding the endogenous receptor of that ligand.

[0622] The antigen-binding domain of a CAR is generally separated from the transmembrane domain by a hinge or spacer. The spacer is also not particularly limited, and it is designed to provide the CAR with flexibility. For example, a spacer domain may comprise a portion of a human Fc domain, including a portion of the CH3 domain, or the hinge region of any immunoglobulin, such as IgA, IgD, IgE, IgG, or IgM, or variants thereof. Furthermore, the hinge region may be modified so as to prevent off-target binding by FcRs or other potential interfering objects. For example, the hinge may comprise an IgG4 Fc domain with or without a S228P, L235E, and/or N297Q mutation (according to Kabat numbering) in order to decrease binding to FcRs. Additional spacers/hinges include, but are not limited to, CD4, CD8, and CD28 hinge regions.

[0623] The transmembrane domain of a CAR may be derived either from a natural or from a synthetic source. Where the source is natural, the domain may be derived from any membrane bound or transmembrane protein. Transmembrane regions of particular use in this disclosure may be derived from CD8, CD28, CD3, CD45, CD4, CD5, CDS, CD9, CD 16, CD22, CD33, CD37, CD64, CD80, CD86, CD 134, CD137, CD 154, TCR. Alternatively, the transmembrane domain may be synthetic, in which case it will comprise predominantly hydrophobic residues such as leucine and valine. Preferably a triplet of phenylalanine, tryptophan and valine will be found at each end of a synthetic transmembrane domain. Optionally, a short oligo- or polypeptide linker, preferably between 2 and 10 amino acids in length may form the linkage between the transmembrane domain and the cytoplasmic signaling domain of the CAR. A glycine-serine doublet provides a particularly suitable linker.

[0624] Alternative CAR constructs may be characterized as belonging to successive generations. First-generation CARs typically consist of a single-chain variable fragment of an antibody specific for an antigen, for example comprising a VL linked to a VH of a specific antibody, linked by a flexible linker, for example by a CD8a hinge domain and a CD8a transmembrane domain, to the transmembrane and intracellular signaling domains of either CD3 or FcRy (scFv-CD3 or scFv-FcRy; see U.S. Pat. Nos. 7,741,465; 5,912,172; 5,906,936). Second-generation CARs incorporate the intracellular domains of one or more costimulatory molecules, such as CD28, OX40 (CD134), or 4-1BB (CD137) within the endodomain (for example scFv-CD28/0X40/4-1BB-CD3; see U.S. Pat. Nos. 8,911,993; 8,916,381; 8,975,071; 9,101,584; 9,102,760; 9,102,761). Third-generation CARs include a combination of costimulatory endodomains, such a CD3-chain, CD97, GDI 1a-CD18, CD2, ICOS, CD27, CD154, CDS, 0X40, 4-1BB, CD2, CD7, LIGHT, LFA-1, NKG2C, B7-H3, CD30, CD40, PD-1, or CD28 signaling domains (for example scFv-CD28-4-1BB-CD3t or scFv-CD28-0X40-CD3; see U.S. Pat. Nos. 8,906,682; 8,399,645; 5,686,281; PCT Publication No. WO2014134165; PCT Publication No. WO2012079000). In certain embodiments, the primary signaling domain comprises a functional signaling domain of a protein selected from the group consisting of CD3 zeta, CD3 gamma, CD3 delta, CD3 epsilon, common FcR gamma (FCERIG), FcR beta (Fc Epsilon Rib), CD79a, CD79b, Fc gamma RIla, DAP10, and DAP12. In certain preferred embodiments, the primary signaling domain comprises a functional signaling domain of CD3t or FcRy. In certain embodiments, the one or more costimulatory signaling domains comprise a functional signaling domain of a protein selected, each independently, from the group consisting of: CD27, CD28, 4-1BB (CD137), 0X40, CD30, CD40, PD-1, ICOS, lymphocyte function-associated antigen-1 (LFA-1), CD2, CD7, LIGHT, NKG2C, B7-H3, a ligand that specifically binds with CD83, CDS, ICAM-1, GITR, BAFFR, HVEM (LIGHTR), SLAMF7, NKp80 (KLRF1), CD160, CD19, CD4, CD8 alpha, CD8 beta, IL2R beta, IL2R gamma, IL7R alpha, ITGA4, VLA1, CD49a, ITGA4, IA4, CD49D, ITGA6, VLA-6, CD49f, ITGAD, CD11d, ITGAE, CD103, ITGAL, CD11a, LFA-1, ITGAM, CD11b, ITGAX, CD11c, ITGB1, CD29, ITGB2, CD18, ITGB7, TNFR2, TRANCE/RANKL, DNAM1 (CD226), SLAMF4 (CD244, 2B4), CD84, CD96 (Tactile), CEACAM1, CRTAM, Ly9 (CD229), CD160 (BY55), PSGL1, CD100 (SEMA4D), CD69, SLAMF6 (NTB-A, Ly108), SLAM (SLAMF1, CD150, IPO-3), BLAME (SLAMF8), SELPLG (CD162), LTBR, LAT, GADS, SLP-76, PAG/Cbp, NKp44, NKp30, NKp46, and NKG2D. In certain embodiments, the one or more co-stimulatory signaling domains comprise a functional signaling domain of a protein selected, each independently, from the group consisting of: 4-1BB, CD27, and CD28. In certain embodiments, a chimeric antigen receptor may have the design as described in U.S. Pat. No. 7,446,190, comprising an intracellular domain of CD3 chain (such as amino acid residues 52-163 of the human CD3 zeta chain, as shown in SEQ ID NO: 14 of U.S. Pat. No. 7,446,190), a signaling region from CD28 and an antigen-binding element (or portion or domain; such as scFv). The CD28 portion, when between the zeta chain portion and the antigen-binding element, may suitably include the transmembrane and signaling domains of CD28 (such as amino acid residues 114-220 of SEQ ID NO: 10, full sequence shown in SEQ ID NO: 6 of U.S. Pat. No. 7,446,190; these can include the following portion of CD28 as set forth in Genbank identifier NM 006139 (sequence version 1, 2 or 3): IEVMYPPPYLDNEKSNGTIIHVKGKHLCPSPLFPGPSKPFWVLVVVGGVLACYSLLVT VAFIIFWVRSKRSRLLHSDYMNMTPRRPGPTRKHYQPYAPPRDFAAYRS (SEQ ID NO: 500)). Alternatively, when the zeta sequence lies between the CD28 sequence and the antigen-binding element, intracellular domain of CD28 can be used alone (such as amino sequence set forth in SEQ ID NO: 9 of U.S. Pat. No. 7,446,190). Hence, certain embodiments employ a CAR comprising (a) a zeta chain portion comprising the intracellular domain of human CD3t chain, (b) a costimulatory signaling region, and (c) an antigen-binding element (or portion or domain), wherein the costimulatory signaling region comprises the amino acid sequence encoded by SEQ ID NO: 6 of U.S. Pat. No. 7,446,190.

[0625] Alternatively, costimulation may be orchestrated by expressing CARs in antigen-specific T cells, chosen so as to be activated and expanded following engagement of their native αβTCR, for example by antigen on professional antigen-presenting cells, with attendant costimulation. In addition, additional engineered receptors may be provided on the immunoresponsive cells, for example to improve targeting of a T-cell attack and/or minimize side effects

[0626] By means of an example and without limitation, Kochenderfer et al., (2009) J Immunother. 32 (7): 689-702 described anti-CD19 chimeric antigen receptors (CAR). FMC63-28Z CAR contained a single chain variable region moiety (scFv) recognizing CD19 derived from the FMC63 mouse hybridoma (described in Nicholson et al., (1997) Molecular Immunology 34: 1157-1165), a portion of the human CD28 molecule, and the intracellular component of the human TCR-ξ molecule. FMC63-CD828BBZ CAR contained the FMC63 scFv, the hinge and transmembrane regions of the CD8 molecule, the cytoplasmic portions of CD28 and 4-1BB, and the cytoplasmic component of the TCR-ξ molecule. The exact sequence of the CD28 molecule included in the FMC63-28Z CAR corresponded to Genbank identifier NM_006139; the sequence included all amino acids starting with the amino acid sequence IEVMYPPPY (SEQ ID NO: 501) and continuing all the way to the carboxy-terminus of the protein. To encode the anti-CD19 scFv component of the vector, the authors designed a DNA sequence which was based on a portion of a previously published CAR (Cooper et al., (2003) Blood 101: 1637-1644). This sequence encoded the following components in frame from the 5′ end to the 3′ end: an Xhol site, the human granulocyte-macrophage colony-stimulating factor (GM-CSF) receptor α-chain signal sequence, the FMC63 light chain variable region (as in Nicholson et al., supra), a linker peptide (as in Cooper et al., supra), the FMC63 heavy chain variable region (as in Nicholson et al., supra), and a Notl site. A plasmid encoding this sequence was digested with Xhol and NotI. To form the MSGV-FMC63-28Z retroviral vector, the XhoI and NotI-digested fragment encoding the FMC63 scFv was ligated into a second Xhol and Notl-digested fragment that encoded the MSGV retroviral backbone (as in Hughes et al., (2005) Human Gene Therapy 16: 457-472) as well as part of the extracellular portion of human CD28, the entire transmembrane and cytoplasmic portion of human CD28, and the cytoplasmic portion of the human TCR-C molecule (as in Maher et al., 2002) Nature Biotechnology 20: 70-75). The FMC63-28Z CAR is included in the KTE-C19 (axicabtagene ciloleucel) anti-CD19 CAR-T therapy product in development by Kite Pharma, Inc. for the treatment of inter alia patients with relapsed/refractory aggressive B-cell non-Hodgkin lymphoma (NHL). Accordingly, in certain embodiments, cells intended for adoptive cell therapies, more particularly immunoresponsive cells such as T cells, may express the FMC63-28Z CAR as described by Kochenderfer et al. (supra). Hence, in certain embodiments, cells intended for adoptive cell therapies, more particularly immunoresponsive cells such as T cells, may comprise a CAR comprising an extracellular antigen-binding element (or portion or domain; such as scFv) that specifically binds to an antigen, an intracellular signaling domain comprising an intracellular domain of a CD3C chain, and a costimulatory signaling region comprising a signaling domain of CD28. Preferably, the CD28 amino acid sequence is as set forth in Genbank identifier NM 006139 (sequence version 1, 2 or 3) starting with the amino acid sequence IEVMYPPPY (SEQ ID NO: 501) and continuing all the way to the carboxy-terminus of the protein. The sequence is reproduced herein: IEVMYPPPYLDNEKSNGTIIHVKGKHLCPSPLFPGPSKPFWVLVVVGGVLACYSLLVT VAFIIFWVRSKRSRLLHSDYMNMTPRRPGPTRKHYQPYAPPRDFAAYRS (SEQ ID NO: 500). Preferably, the antigen is CD19, more preferably the antigen-binding element is an anti-CD19 scFv, even more preferably the anti-CD19 scFv as described by Kochenderfer et al. (supra).

[0627] Additional anti-CD19 CARs are further described in WO2015187528. More particularly Example 1 and Table 1 of WO2015187528, incorporated by reference herein, demonstrate the generation of anti-CD19 CARs based on a fully human anti-CD19 monoclonal antibody (47G4, as described in US20100104509) and murine anti-CD19 monoclonal antibody (as described in Nicholson et al. and explained above). Various combinations of a signal sequence (human CD8-alpha or GM-CSF receptor), extracellular and transmembrane regions (human CD8-alpha) and intracellular T-cell signaling domains (CD28-CD3ξ; 4-1BB-CD3ξ; CD27-CD3ξ; CD28-CD27-CD3ξ; 4-1BB-CD27-CD3ξ; CD27-4-1BB-CD3ξ; CD28-CD27-FccRI gamma chain; or CD28-FccRI gamma chain) were disclosed. Hence, in certain embodiments, cells intended for adoptive cell therapies, more particularly immunoresponsive cells such as T cells, may comprise a CAR comprising an extracellular antigen-binding element that specifically binds to an antigen, an extracellular and transmembrane region as set forth in Table 1 of WO2015187528 and an intracellular T-cell signaling domain as set forth in Table 1 of WO2015187528. Preferably, the antigen is CD19, more preferably the antigen-binding element is an anti-CD19 scFv, even more preferably the mouse or human anti-CD19 scFv as described in Example 1 of WO2015187528. In certain embodiments, the CAR comprises, consists essentially of or consists of an amino acid sequence of SEQ ID NO: 1, SEQ ID NO: 2, SEQ ID NO: 3, SEQ ID NO: 4, SEQ ID NO: 5, SEQ ID NO: 6, SEQ ID NO: 7, SEQ ID NO: 8, SEQ ID NO: 9, SEQ ID NO: 10, SEQ ID NO: 11, SEQ ID NO: 12, or SEQ ID NO: 13 as set forth in Table 1 of WO2015187528.

[0628] By means of an example and without limitation, chimeric antigen receptor that recognizes the CD70 antigen is described in WO2012058460A2 (see also, Park et al., CD70 as a target for chimeric antigen receptor T cells in head and neck squamous cell carcinoma, Oral Oncol. 2018 March;78:145-150; and Jin et al., CD70, a novel target of CAR T-cell therapy for gliomas, Neuro Oncol. 2018 Jan. 10; 20(1):55-65). CD70 is expressed by diffuse large B-cell and follicular lymphoma and also by the malignant cells of Hodgkins lymphoma, Waldenstrom's macroglobulinemia and multiple myeloma, and by HTLV-1- and EBV-associated malignancies. (Agathanggelou et al. Am.J.Pathol. 1995;147: 1152-1160; Hunter et al., Blood 2004; 104:4881. 26; Lens et al., J Immunol. 2005; 174:6212-6219; Baba et al., J Virol. 2008; 82:3843-3852.) In addition, CD70 is expressed by non-hematological malignancies such as renal cell carcinoma and glioblastoma. (Junker et al., J Urol. 2005; 173:2150-2153; Chahlavi et al., Cancer Res 2005; 65:5428-5438) Physiologically, CD70 expression is transient and restricted to a subset of highly activated T, B, and dendritic cells.

[0629] By means of an example and without limitation, chimeric antigen receptor that recognizes BCMA has been described (see, e.g., US20160046724A1; WO2016014789A2; WO2017211900A1; WO2015158671A1; US20180085444A1; WO2018028647A1; US20170283504A1; and WO2013154760A1).

[0630] In certain embodiments, the immune cell may, in addition to a CAR or exogenous TCR as described herein, further comprise a chimeric inhibitory receptor (inhibitory CAR) that specifically binds to a second target antigen and is capable of inducing an inhibitory or immunosuppressive or repressive signal to the cell upon recognition of the second target antigen. In certain embodiments, the chimeric inhibitory receptor comprises an extracellular antigen-binding element (or portion or domain) configured to specifically bind to a target antigen, a transmembrane domain, and an intracellular immunosuppressive or repressive signaling domain. In certain embodiments, the second target antigen is an antigen that is not expressed on the surface of a cancer cell or infected cell or the expression of which is downregulated on a cancer cell or an infected cell. In certain embodiments, the second target antigen is an MHC-class I molecule. In certain embodiments, the intracellular signaling domain comprises a functional signaling portion of an immune checkpoint molecule, such as for example PD-1 or CTLA4. Advantageously, the inclusion of such inhibitory CAR reduces the chance of the engineered immune cells attacking non-target (e.g., non-cancer) tissues.

[0631] Alternatively, T-cells expressing CARs may be further modified to reduce or eliminate expression of endogenous TCRs in order to reduce off-target effects. Reduction or elimination of endogenous TCRs can reduce off-target effects and increase the effectiveness of the T cells (U.S. Pat. No. 9,181,527). T cells stably lacking expression of a functional TCR may be produced using a variety of approaches. T cells internalize, sort, and degrade the entire T cell receptor as a complex, with a half-life of about 10 hours in resting T cells and 3 hours in stimulated T cells (von Essen, M. et al. 2004. J. Immunol. 173:384-393). Proper functioning of the TCR complex requires the proper stoichiometric ratio of the proteins that compose the TCR complex. TCR function also requires two functioning TCR zeta proteins with ITAM motifs. The activation of the TCR upon engagement of its MEC-peptide ligand requires the engagement of several TCRs on the same T cell, which all must signal properly. Thus, if a TCR complex is destabilized with proteins that do not associate properly or cannot signal optimally, the T cell will not become activated sufficiently to begin a cellular response.

[0632] Accordingly, in one example embodiment, TCR expression may eliminated using RNA interference (e.g., shRNA, siRNA, miRNA, etc.), CRISPR, or other methods that target the nucleic acids encoding specific TCRs (e.g., TCR-α and TCR-β) and/or CD3 chains in primary T cells. By blocking expression of one or more of these proteins, the T cell will no longer produce one or more of the key components of the TCR complex, thereby destabilizing the TCR complex and preventing cell surface expression of a functional TCR.

[0633] In some instances, CAR may also comprise a switch mechanism for controlling expression and/or activation of the CAR. For example, a CAR may comprise an extracellular, transmembrane, and intracellular domain, in which the extracellular domain comprises a target-specific binding element that comprises a label, binding domain, or tag that is specific for a molecule other than the target antigen that is expressed on or by a target cell. In such embodiments, the specificity of the CAR is provided by a second construct that comprises a target antigen binding domain (e.g., an scFv or a bispecific antibody that is specific for both the target antigen and the label or tag on the CAR) and a domain that is recognized by or binds to the label, binding domain, or tag on the CAR. See, e.g., WO 2013/044225, WO 2016/000304, WO 2015/057834, WO 2015/057852, WO 2016/070061, U.S. Pat. No. 9,233,125, US 2016/0129109. In this way, a T-cell that expresses the CAR can be administered to a subject, but the CAR cannot bind its target antigen until the second composition comprising an antigen-specific binding domain is administered.

[0634] Alternative switch mechanisms include CARs that require multimerization in order to activate their signaling function (see, e.g., US 2015/0368342, US 2016/0175359, US 2015/0368360) and/or an exogenous signal, such as a small molecule drug (US 2016/0166613, Yung et al., Science, 2015), in order to elicit a T-cell response. Some CARs may also comprise a “suicide switch” to induce cell death of the CAR T-cells following treatment (Buddee et al., PLoS One, 2013) or to downregulate expression of the CAR following binding to the target antigen (WO 2016/011210)

[0635] Alternative techniques may be used to transform target immunoresponsive cells, such as protoplast fusion, lipofection, transfection or electroporation. A wide variety of vectors may be used, such as retroviral vectors, lentiviral vectors, adenoviral vectors, adeno-associated viral vectors, plasmids or transposons, such as a Sleeping Beauty transposon (see U.S. Pat. Nos. 6,489,458; 7,148,203; 7,160,682; 7,985,739; 8,227,432), may be used to introduce CARs, for example using 2^{nd} generation antigen-specific CARs signaling through CD3 and either CD28 or CD137. Viral vectors may for example include vectors based on HIV, SV40, EBV, HSV or BPV.

[0636] Cells that are targeted for transformation may for example include T cells, Natural Killer (NK) cells, cytotoxic T lymphocytes (CTL), regulatory T cells, human embryonic stem cells, tumor-infiltrating lymphocytes (Tit) or a pluripotent stem cell from which lymphoid cells may be differentiated. T cells expressing a desired CAR may for example be selected through co-culture with γ-irradiated activating and propagating cells (AaPC), which co-express the cancer antigen and co-stimulatory molecules. The engineered CAR T-cells may be expanded, for example by co-culture on AaPC in presence of soluble factors, such as IL-2 and IL-21. This expansion may for example be carried out so as to provide memory CAR+T cells (which may for example be assayed by non-enzymatic digital array and/or multi-panel flow cytometry). In this way, CAR T cells may be provided that have specific cytotoxic activity against antigen-bearing tumors (optionally in conjunction with production of desired chemokines such as interferon-γ). CAR T cells of this kind may for example be used in animal models, for example to treat tumor xenografts.

[0637] In certain embodiments, ACT includes co-transferring CD4+Th1 cells and CD8+CTLs to induce a synergistic antitumour response (see, e.g., Li et al., Adoptive cell therapy with CD4+T helper 1 cells and CD8+ cytotoxic T cells enhances complete rejection of an established tumour, leading to generation of endogenous memory responses to non-targeted tumour epitopes. Clin Transl Immunology. 2017 October; 6(10): e160).

[0638] In certain embodiments, Th17 cells are transferred to a subject in need thereof. Th17 cells have been reported to directly eradicate melanoma tumors in mice to a greater extent than Th1 cells (Muranski P, et al., Tumor-specific Th17-polarized cells eradicate large established melanoma. Blood. 2008 Jul. 15; 112(2):362-73; and Martin-Orozco N, et al., T helper 17 cells promote cytotoxic T cell activation in tumor immunity. Immunity. 2009 Nov. 20; 31(5):787-98). Those studies involved an adoptive T cell transfer (ACT) therapy approach, which takes advantage of CD4+T cells that express a TCR recognizing tyrosinase tumor antigen. Exploitation of the TCR leads to rapid expansion of Th17 populations to large numbers ex vivo for reinfusion into the autologous tumor-bearing hosts.

[0639] In certain embodiments, ACT may include autologous iPSC-based vaccines, such as irradiated iPSCs in autologous anti-tumor vaccines (see e.g., Kooreman, Nigel G. et al., Autologous iPSC-Based Vaccines Elicit Anti-tumor Responses In Vivo, Cell Stem Cell 22, 1-13, 2018, doi.org/10.1016/j.stem.2018.01.016).

[0640] Unlike T-cell receptors (TCRs) that are MHC restricted, CARs can potentially bind any cell surface-expressed antigen and can thus be more universally used to treat patients (see Irving et al., Engineering Chimeric Antigen Receptor T-Cells for Racing in Solid Tumors: Don't Forget the Fuel, Front. Immunol., 3 Apr. 2017, doi.org/10.3389/fimmu.2017.00267). In certain embodiments, in the absence of endogenous T-cell infiltrate (e.g., due to aberrant antigen processing and presentation), which precludes the use of Tit therapy and immune checkpoint blockade, the transfer of CAR T-cells may be used to treat patients (see, e.g., Hinrichs C S, Rosenberg S A. Exploiting the curative potential of adoptive T-cell therapy for cancer. Immunol Rev (2014) 257(1):56-71. doi:10.1111/imr.12132).

[0641] Approaches such as the foregoing may be adapted to provide methods of treating and/or increasing survival of a subject having a disease, such as a neoplasia, for example by administering an effective amount of an immunoresponsive cell comprising an antigen recognizing receptor that binds a selected antigen, wherein the binding activates the immunoresponsive cell, thereby treating or preventing the disease (such as a neoplasia, a pathogen infection, an autoimmune disorder, or an allogeneic transplant reaction).

[0642] In certain embodiments, the treatment can be administered after lymphodepleting pretreatment in the form of chemotherapy (typically a combination of cyclophosphamide and fludarabine) or radiation therapy. Initial studies in ACT had short lived responses and the transferred cells did not persist in vivo for very long (Houot et al., T-cell-based immunotherapy: adoptive cell transfer and checkpoint inhibition. Cancer Immunol Res (2015) 3(10):1115-22; and Kamta et al., Advancing Cancer Therapy with Present and Emerging Immuno-Oncology Approaches. Front. Oncol. (2017) 7:64). Immune suppressor cells like Tregs and MDSCs may attenuate the activity of transferred cells by outcompeting them for the necessary cytokines. Not being bound by a theory lymphodepleting pretreatment may eliminate the suppressor cells allowing the TILs to persist.

[0643] In one example embodiment, the treatment can be administrated into patients undergoing an immunosuppressive treatment (e.g., glucocorticoid treatment). The cells, or population of cells, may be made resistant to at least one immunosuppressive agent due to the inactivation of a gene encoding a receptor for such immunosuppressive agent. In certain embodiments, the immunosuppressive treatment provides for the selection and expansion of the immunoresponsive T cells within the patient.

[0644] In certain embodiments, the treatment can be administered before primary treatment (e.g., surgery or radiation therapy) to shrink a tumor before the primary treatment. In another embodiment, the treatment can be administered after primary treatment to remove any remaining cancer cells.

[0645] In certain embodiments, immunometabolic barriers can be targeted therapeutically prior to and/or during ACT to enhance responses to ACT or CAR T-cell therapy and to support endogenous immunity (see, e.g., Irving et al., Engineering Chimeric Antigen Receptor T-Cells for Racing in Solid Tumors: Don't Forget the Fuel, Front. Immunol., 3 Apr. 2017, doi.org/10.3389/fimmu.2017. 00267).

[0646] The administration of cells or population of cells, such as immune system cells or cell populations, such as more particularly immunoresponsive cells or cell populations, as disclosed herein may be carried out in any convenient manner, including by aerosol inhalation, injection, ingestion, transfusion, implantation or transplantation. The cells or population of cells may be administered to a patient subcutaneously, intradermally, intratumorally, intranodally, intramedullary, intramuscularly, intrathecally, by intravenous or intralymphatic injection, or intraperitoneally. In one example embodiment, the disclosed CARs may be delivered or administered into a cavity formed by the resection of tumor tissue (i.e. intracavity delivery) or directly into a tumor prior to resection (i.e. intratumoral delivery). In one example embodiment, the cell compositions of the present invention are preferably administered by intravenous injection.

[0647] The administration of the cells or population of cells can consist of the administration of 104-109 cells per kg body weight, preferably 105 to 106 cells/kg body weight including all integer values of cell numbers within those ranges. Dosing in CART cell therapies may for example involve administration of from 106 to 109 cells/kg, with or without a course of lymphodepletion, for example with cyclophosphamide. The cells or population of cells can be administrated in one or more doses. In another embodiment, the effective amount of cells are administrated as a single dose. In another embodiment, the effective amount of cells are administrated as more than one dose over a period time. Timing of administration is within the judgment of managing physician and depends on the clinical condition of the patient. The cells or population of cells may be obtained from any source, such as a blood bank or a donor. While individual needs vary, determination of optimal ranges of effective amounts of a given cell type for a particular disease or conditions are within the skill of one in the art. An effective amount means an amount which provides a therapeutic or prophylactic benefit. The dosage administrated will be dependent upon the age, health and weight of the recipient, kind of concurrent treatment, if any, frequency of treatment and the nature of the effect desired.

[0648] In another embodiment, the effective amount of cells or composition comprising those cells are administrated parenterally. The administration can be an intravenous administration. The administration can be directly done by injection within a tumor.

[0649] To guard against possible adverse reactions, engineered immunoresponsive cells may be equipped with a transgenic safety switch, in the form of a transgene that renders the cells vulnerable to exposure to a specific signal. For example, the herpes simplex viral thymidine kinase (TK) gene may be used in this way, for example by introduction into allogeneic T lymphocytes used as donor lymphocyte infusions following stem cell transplantation (Greco, et al., Improving the safety of cell therapy with the TK-suicide gene. Front. Pharmacol. 2015; 6: 95). In such cells, administration of a nucleoside prodrug such as ganciclovir or acyclovir causes cell death. Alternative safety switch constructs include inducible caspase 9, for example triggered by administration of a small-molecule dimerizer that brings together two nonfunctional icasp9 molecules to form the active enzyme. A wide variety of alternative approaches to implementing cellular proliferation controls have been described (see U.S. Patent Publication No. 20130071414; PCT Patent Publication WO2011146862; PCT Patent Publication WO2014011987; PCT Patent Publication WO2013040371; Zhou et al. BLOOD, 2014, 123/25:3895-3905; Di Stasi et al., The New England Journal of Medicine 2011; 365:1673-1683; Sadelain M, The New England Journal of Medicine 2011; 365:1735-173; Ramos et al., Stem Cells 28(6):1107-15 (2010)).

[0650] In a further refinement of adoptive therapies, genome editing may be used to tailor immunoresponsive cells to alternative implementations, for example providing edited CAR T cells (see Poirot et al., 2015, Multiplex genome edited T-cell manufacturing platform for “off-the-shelf” adoptive T-cell immunotherapies, Cancer Res 75 (18): 3853; Ren et al., 2017, Multiplex genome editing to generate universal CAR T cells resistant to PD1 inhibition, Clin Cancer Res. 2017 May 1;23(9):2255-2266. doi: 10.1158/1078-0432.CCR-16-1300. Epub 2016 Nov. 4; Qasim et al., 2017, Molecular remission of infant B-ALL after infusion of universal TALEN gene-edited CAR T cells, Sci Transl Med. 2017 Jan. 25; 9(374); Legut, et al., 2018, CRISPR-mediated TCR replacement generates superior anticancer transgenic T cells. Blood, 131(3), 311-322; and Georgiadis et al., Long Terminal Repeat CRISPR-CAR-Coupled “Universal” T Cells Mediate Potent Anti-leukemic Effects, Molecular Therapy, In Press, Corrected Proof, Available online 6 Mar. 2018). Cells may be edited using any CRISPR system and method of use thereof as described herein. The composition and systems may be delivered to an immune cell by any method described herein. In preferred embodiments, cells are edited ex vivo and transferred to a subject in need thereof. Immunoresponsive cells, CAR T cells or any cells used for adoptive cell transfer may be edited. Editing may be performed for example to insert or knock-in an exogenous gene, such as an exogenous gene encoding a CAR or a TCR, at a preselected locus in a cell (e.g. TRAC locus); to eliminate potential alloreactive T-cell receptors (TCR) or to prevent inappropriate pairing between endogenous and exogenous TCR chains, such as to knock-out or knock-down expression of an endogenous TCR in a cell; to disrupt the target of a chemotherapeutic agent in a cell; to block an immune checkpoint, such as to knock-out or knock-down expression of an immune checkpoint protein or receptor in a cell; to knock-out or knock-down expression of other gene or genes in a cell, the reduced expression or lack of expression of which can enhance the efficacy of adoptive therapies using the cell; to knock-out or knock-down expression of an endogenous gene in a cell, said endogenous gene encoding an antigen targeted by an exogenous CAR or TCR; to knock-out or knock-down expression of one or more MHC constituent proteins in a cell; to activate a T cell; to modulate cells such that the cells are resistant to exhaustion or dysfunction; and/or increase the differentiation and/or proliferation of functionally exhausted or dysfunctional CD8+T-cells (see PCT Patent Publications: WO2013176915, WO2014059173, WO2014172606, WO2014184744, and WO2014191128).

[0651] In certain embodiments, editing may result in inactivation of a gene. By inactivating a gene, it is intended that the gene of interest is not expressed in a functional protein form. In a particular embodiment, the system specifically catalyzes cleavage in one targeted gene thereby inactivating said targeted gene. The nucleic acid strand breaks caused are commonly repaired through the distinct mechanisms of homologous recombination or non-homologous end joining (NHEJ). However, NHEJ is an imperfect repair process that often results in changes to the DNA sequence at the site of the cleavage. Repair via non-homologous end joining (NHEJ) often results in small insertions or deletions (Indel) and can be used for the creation of specific gene knockouts. Cells in which a cleavage induced mutagenesis event has occurred can be identified and/or selected by well-known methods in the art. In certain embodiments, homology directed repair (HDR) is used to concurrently inactivate a gene (e.g., TRAC) and insert an endogenous TCR or CAR into the inactivated locus.

[0652] Hence, in certain embodiments, editing of cells, particularly cells intended for adoptive cell therapies, more particularly immunoresponsive cells such as T cells, may be performed to insert or knock-in an exogenous gene, such as an exogenous gene encoding a CAR or a TCR, at a preselected locus in a cell. Conventionally, nucleic acid molecules encoding CARs or TCRs are transfected or transduced to cells using randomly integrating vectors, which, depending on the site of integration, may lead to clonal expansion, oncogenic transformation, variegated transgene expression and/or transcriptional silencing of the transgene. Directing of transgene(s) to a specific locus in a cell can minimize or avoid such risks and advantageously provide for uniform expression of the transgene(s) by the cells. Without limitation, suitable ‘safe harbor’ loci for directed transgene integration include CCR5 or AAVS1. Homology-directed repair (HDR) strategies are known and described elsewhere in this specification allowing to insert transgenes into desired loci (e.g., TRAC locus).

[0653] Further suitable loci for insertion of transgenes, in particular CAR or exogenous TCR transgenes, include without limitation loci comprising genes coding for constituents of endogenous T-cell receptor, such as T-cell receptor alpha locus (TRA) or T-cell receptor beta locus (TRB), for example T-cell receptor alpha constant (TRAC) locus, T-cell receptor beta constant 1 (TRBC1) locus or T-cell receptor beta constant 2 (TRBC1) locus. Advantageously, insertion of a transgene into such locus can simultaneously achieve expression of the transgene, potentially controlled by the endogenous promoter, and knock-out expression of the endogenous TCR. This approach has been exemplified in Eyquem et al., (2017) Nature 543: 113-117, wherein the authors used CRISPR/Cas9 gene editing to knock-in a DNA molecule encoding a CD19-specific CAR into the TRAC locus downstream of the endogenous promoter; the CAR-T cells obtained by CRISPR were significantly superior in terms of reduced tonic CAR signaling and exhaustion.

[0654] T cell receptors (TCR) are cell surface receptors that participate in the activation of T cells in response to the presentation of antigen. The TCR is generally made from two chains, α and β, which assemble to form a heterodimer and associates with the CD3-transducing subunits to form the T cell receptor complex present on the cell surface. Each a and 13 chain of the TCR consists of an immunoglobulin-like N-terminal variable (V) and constaI(C) region, a hydrophobic transmembrane domain, and a short cytoplasmic region. As for immunoglobulin molecules, the variable region of the α and β chains are generated by V(D)J recombination, creating a large diversity of antigen specificities within the population of T cells. However, in contrast to immunoglobulins that recognize intact antigen, T cells are activated by processed peptide fragments in association with an MHC molecule, introducing an extra dimension to antigen recognition by T cells, known as MHC restriction. Recognition of MHC disparities between the donor and recipient through the T cell receptor leads to T cell proliferation and the potential development of graft versus host disease (GVHD). The inactivation of TCRα or TCRβ can result in the elimination of the TCR from the surface of T cells preventing recognition of alloantigen and thus GVHD. However, TCR disruption generally results in the elimination of the CD3 signaling component and alters the means of further T cell expansion.

[0655] Hence, in certain embodiments, editing of cells, particularly cells intended for adoptive cell therapies, more particularly immunoresponsive cells such as T cells, may be performed to knock-out or knock-down expression of an endogenous TCR in a cell. For example, NHEJ-based or HDR-based gene editing approaches can be employed to disrupt the endogenous TCR alpha and/or beta chain genes. For example, gene editing system or systems, such as CRISPR/Cas system or systems, can be designed to target a sequence found within the TCR beta chain conserved between the beta 1 and beta 2 constant region genes (TRBC1 and TRBC2) and/or to target the constant region of the TCR alpha chain (TRAC) gene.

[0656] Allogeneic cells are rapidly rejected by the host immune system. It has been demonstrated that, allogeneic leukocytes present in non-irradiated blood products will persist for no more than 5 to 6 days (Boni, Muranski et al. 2008 Blood 1;112(12):4746-54). Thus, to prevent rejection of allogeneic cells, the host's immune system usually has to be suppressed to some extent. However, in the case of adoptive cell transfer the use of immunosuppressive drugs also have a detrimental effect on the introduced therapeutic T cells. Therefore, to effectively use an adoptive immunotherapy approach in these conditions, the introduced cells would need to be resistant to the immunosuppressive treatment. Thus, in a particular embodiment, the present invention further comprises a step of modifying T cells to make them resistant to an immunosuppressive agent, preferably by inactivating at least one gene encoding a target for an immunosuppressive agent. An immunosuppressive agent is an agent that suppresses immune function by one of several mechanisms of action. An immunosuppressive agent can be, but is not limited to a calcineurin inhibitor, a target of rapamycin, an interleukin-2 receptor α-chain blocker, an inhibitor of inosine monophosphate dehydrogenase, an inhibitor of dihydrofolic acid reductase, a corticosteroid or an immunosuppressive antimetabolite. The present invention allows conferring immunosuppressive resistance to T cells for immunotherapy by inactivating the target of the immunosuppressive agent in T cells. As non-limiting examples, targets for an immunosuppressive agent can be a receptor for an immunosuppressive agent such as: CD52, glucocorticoid receptor (GR), a FKBP family gene member and a cyclophilin family gene member.

[0657] In certain embodiments, editing of cells, particularly cells intended for adoptive cell therapies, more particularly immunoresponsive cells such as T cells, may be performed to block an immune checkpoint, such as to knock-out or knock-down expression of an immune checkpoint protein or receptor in a cell. Immune checkpoints are inhibitory pathways that slow down or stop immune reactions and prevent excessive tissue damage from uncontrolled activity of immune cells. In certain embodiments, the immune checkpoint targeted is the programmed death-1 (PD-1 or CD279) gene (PDCD1). In other embodiments, the immune checkpoint targeted is cytotoxic T-lymphocyte-associated antigen (CTLA-4). In additional embodiments, the immune checkpoint targeted is another member of the CD28 and CTLA4 Ig superfamily such as BTLA, LAG3, ICOS, PDL1 or KIR. In further additional embodiments, the immune checkpoint targeted is a member of the TNFR superfamily such as CD40, OX40, CD137, GITR, CD27 or TIM-3.

[0658] Additional immune checkpoints include Src homology 2 domain-containing protein tyrosine phosphatase 1 (SHP-1) (Watson H A, et al., SHP-1: the next checkpoint target for cancer immunotherapy? Biochem Soc Trans. 2016 Apr. 15; 44(2):356-62). SHP-1 is a widely expressed inhibitory protein tyrosine phosphatase (PTP). In T-cells, it is a negative regulator of antigen-dependent activation and proliferation. It is a cytosolic protein, and therefore not amenable to antibody-mediated therapies, but its role in activation and proliferation makes it an attractive target for genetic manipulation in adoptive transfer strategies, such as chimeric antigen receptor (CAR) T cells. Immune checkpoints may also include T cell immunoreceptor with Ig and ITIM domains (TIGIT/Vstm3/WUCAM/VSIG9) and VISTA (Le Mercier I, et al., (2015) Beyond CTLA-4 and PD-1, the generation Z of negative checkpoint regulators. Front. Immunol. 6:418).

[0659] International Patent Publication No. WO2014172606 relates to the use of MT1 and/or MT2 inhibitors to increase proliferation and/or activity of exhausted CD8+T-cells and to decrease CD8+T-cell exhaustion (e.g., decrease functionally exhausted or unresponsive CD8+immune cells). In certain embodiments, metallothioneins are targeted by gene editing in adoptively transferred T cells.

[0660] In certain embodiments, targets of gene editing may be at least one targeted locus involved in the expression of an immune checkpoint protein. Such targets may include, but are not limited to CTLA4, PPP2CA, PPP2CB, PTPN6, PTPN22, PDCD1, ICOS (CD278), PDL1, KIR, LAG3, HAVCR2, BTLA, CD160, TIGIT, CD96, CRTAM, LAIR1, SIGLEC7, SIGLEC9, CD244 (2B4), TNFRSF10B, TNFRSF10A, CASP8, CASP10, CASP3, CASP6, CASP7, FADD, FAS, TGFBRII, TGFRBRI, SMAD2, SMAD3, SMAD4, SMAD10, SKI, SKIL, TGIF1, IL10RA, IL10RB, HMOX2, IL6R, IL6ST, EIF2AK4, CSK, PAG1, SITZ, FOXP3, PRDM1, BATF, VISTA, GUCY1A2, GUCY1A3, GUCY1B2, GUCY1B3, MT1, MT2, CD40, OX40, CD137, GITR, CD27, SHP-1, TIM-3, CEACAM-1, CEACAM-3, or CEACAM-5. In preferred embodiments, the gene locus involved in the expression of PD-1 or CTLA-4 genes is targeted. In other preferred embodiments, combinations of genes are targeted, such as but not limited to PD-1 and TIGIT.

[0661] By means of an example and without limitation, WO2016196388 concerns an engineered T cell comprising (a) a genetically engineered antigen receptor that specifically binds to an antigen, which receptor may be a CAR; and (b) a disrupted gene encoding a PD-L1, an agent for disruption of a gene encoding a PD-Ll, and/or disruption of a gene encoding PD-L1, wherein the disruption of the gene may be mediated by a gene editing nuclease, a zinc finger nuclease (ZFN), CRISPR/Cas9 and/or TALEN. WO2015142675 relates to immune effector cells comprising a CAR in combination with an agent (such as the composition or system herein) that increases the efficacy of the immune effector cells in the treatment of cancer, wherein the agent may inhibit an immune inhibitory molecule, such as PD1, PD-L1, CTLA-4, TIM-3, LAG-3, VISTA, BTLA, TIGIT, LAIR1, CD160, 2B4, TGFR beta, CEACAM-1, CEACAM-3, or CEACAM-5. Ren et al., (2017) Clin Cancer Res 23 (9) 2255-2266 performed lentiviral delivery of CAR and electro-transfer of Cas9 mRNA and gRNAs targeting endogenous TCR, β-2 microglobulin (B2M) and PD1 simultaneously, to generate gene-disrupted allogeneic CART cells deficient of TCR, HLA class I molecule and PD1.

[0662] In certain embodiments, cells may be engineered to express a CAR, wherein expression and/or function of methylcytosine dioxygenase genes (TET1, TET2 and/or TET3) in the cells has been reduced or eliminated, (such as the composition or system herein) (for example, as described in WO201704916).

[0663] In certain embodiments, editing of cells, particularly cells intended for adoptive cell therapies, more particularly immunoresponsive cells such as T cells, may be performed to knock-out or knock-down expression of an endogenous gene in a cell, said endogenous gene encoding an antigen targeted by an exogenous CAR or TCR, thereby reducing the likelihood of targeting of the engineered cells. In certain embodiments, the targeted antigen may be one or more antigen selected from the group consisting of CD38, CD138, CS-1, CD33, CD26, CD30, CD53, CD92, CD100, CD148, CD150, CD200, CD261, CD262, CD362, human telomerase reverse transcriptase (hT Choleraervivin, mouse double minute 2 homolog (MDM2), cytochrome P450 1B1 (CYP1B), HER2/neu, Wilms' tumor gene 1 (WT1), livin, alphafetoprotein (AFP), carcinoembryonic antigen (CEA), mucin 16 (MUC16), MUC1, prostate-specific membrane antigen (PSMA), p53, cyclin (Dl), B cell maturation antigen (BCMA), transmembrane activator and CAML Interactor (TACI), and B-cell activating factor receptor (BAFF-R) (for example, as described in WO2016011210 and WO2017011804).

[0664] In certain embodiments, editing of cells, particularly cells intended for adoptive cell therapies, more particularly immunoresponsive cells such as T cells, may be performed to knock-out or knock-down expression of one or more MHC constituent proteins, such as one or more HLA proteins and/or beta-2 microglobulin (B2M), in a cell, whereby rejection of non-autologous (e.g., allogeneic) cells by the recipient's immune system can be reduced or avoided. In preferred embodiments, one or more HLA class I proteins, such as HLA-A, B and/or C, and/or B2M may be knocked-out or knocked-down. Preferably, B2M may be knocked-out or knocked-down. By means of an example, Ren et al., (2017) Clin Cancer Res 23 (9) 2255-2266 performed lentiviral delivery of CAR and electro-transfer of Cas9 mRNA and gRNAs targeting endogenous TCR, 0-2 microglobulin (B2M) and PD1 simultaneously, to generate gene-disrupted allogeneic CART cells deficient of TCR, HLA class I molecule and PD1.

[0665] In other embodiments, at least two genes are edited. Pairs of genes may include, but are not limited to PD1 and TCRα, PD1 and TCRβ, CTLA-4 and TCRα, CTLA-4 and TCRβ, LAG3 and TCRα, LAG3 and TCRβ, Tim3 and TCRα, Tim3 and TCRβ, BTLA and TCRα, BTLA and TCRβ, BY55 and TCRα, BY55 and TCRβ, TIGIT and TCRα, TIGIT and TCRβ, B7H5 and TCRα, B7H5 and TCRO, LAIR1 and TCRα, LAIR1 and TCRβ, SIGLEC10 and TCRα, SIGLEC10 and TCRβ, 2B4 and TCRα, 2B4 and TCRβ, B2M and TCRα, B2M and TCRO.

[0666] In certain embodiments, a cell may be multiplied edited (multiplex genome editing) as taught herein to (1) knock-out or knock-down expression of an endogenous TCR (for example, TRBC1, TRBC2 and/or TRAC), (2) knock-out or knock-down expression of an immune checkpoint protein or receptor (for example PD1, PD-L1 and/or CTLA4); and (3) knock-out or knock-down expression of one or more MHC constituent proteins (for example, HLA-A, B and/or C, and/or B2M, preferably B2M).

[0667] Whether prior to or after genetic modification of the T cells, the T cells can be activated and expanded generally using methods as described, for example, in U.S. Pat. Nos. 6,352,694; 6,534,055; 6,905,680; 5,858,358; 6,887,466; 6,905,681; 7,144,575; 7,232,566; 7,175,843; 5,883,223; 6,905,874; 6,797,514; 6,867,041; and 7,572,631. T cells can be expanded in vitro or in vivo.

[0668] Immune cells may be obtained using any method known in the art. In one example embodiment, allogenic T cells may be obtained from healthy subjects. In one example embodiment T cells that have infiltrated a tumor are isolated. T cells may be removed during surgery. T cells may be isolated after removal of tumor tissue by biopsy. T cells may be isolated by any means known in the art. In one example embodiment, T cells are obtained by apheresis. In one example embodiment, the method may comprise obtaining a bulk population of T cells from a tumor sample by any suitable method known in the art. For example, a bulk population of T cells can be obtained from a tumor sample by dissociating the tumor sample into a cell suspension from which specific cell populations can be selected. Suitable methods of obtaining a bulk population of T cells may include, but are not limited to, any one or more of mechanically dissociating (e.g., mincing) the tumor, enzymatically dissociating (e.g., digesting) the tumor, and aspiration (e.g., as with a needle).

[0669] The bulk population of T cells obtained from a tumor sample may comprise any suitable type of T cell. Preferably, the bulk population of T cells obtained from a tumor sample comprises tumor infiltrating lymphocytes (TILs).

[0670] The tumor sample may be obtained from any mammal. Unless stated otherwise, as used herein, the term “mammal” refers to any mammal including, but not limited to, mammals of the order Logomorpha, such as rabbits; the order Carnivora, including Felines (cats) and Canines (dogs); the order Artiodactyla, including Bovines (cows) and Swines (pigs); or of the order Perssodactyla, including Equines (horses). The mammals may be non-human primates, e.g., of the order Primates, Ceboids, or Simoids (monkeys) or of the order Anthropoids (humans and apes). In one example embodiment, the mammal may be a mammal of the order Rodentia, such as mice and hamsters. Preferably, the mammal is a non-human primate or a human. An especially preferred mammal is the human.

[0671] T cells can be obtained from a number of sources, including peripheral blood mononuclear cells (PBMC), bone marrow, lymph node tissue, spleen tissue, and tumors. In certain embodiments of the present invention, T cells can be obtained from a unit of blood collected from a subject using any number of techniques known to the skilled artisan, such as Ficoll separation. In one preferred embodiment, cells from the circulating blood of an individual are obtained by apheresis or leukapheresis. The apheresis product typically contains lymphocytes, including T cells, monocytes, granulocytes, B cells, other nucleated white blood cells, red blood cells, and platelets. In one example embodiment, the cells collected by apheresis may be washed to remove the plasma fraction and to place the cells in an appropriate buffer or media for subsequent processing steps. In one example embodiment of the invention, the cells are washed with phosphate buffered saline (PBS). In an alternative embodiment, the wash solution lacks calcium and may lack magnesium or may lack many if not all divalent cations. Initial activation steps in the absence of calcium lead to magnified activation. As those of ordinary skill in the art would readily appreciate a washing step may be accomplished by methods known to those in the art, such as by using a semi-automated “flow-through” centrifuge (for example, the Cobe 2991 cell processor) according to the manufacturer's instructions. After washing, the cells may be resuspended in a variety of biocompatible buffers, such as, for example, Ca-free, Mg-free PBS. Alternatively, the undesirable components of the apheresis sample may be removed and the cells directly resuspended in culture media.

[0672] In another embodiment, T cells are isolated from peripheral blood lymphocytes by lysing the red blood cells and depleting the monocytes, for example, by centrifugation through a PERCOLL™ gradient. A specific subpopulation of T cells, such as CD28+, CD4+, CDC, CD45RA+, and CD45RO+T cells, can be further isolated by positive or negative selection techniques. For example, in one preferred embodiment, T cells are isolated by incubation with anti-CD 3/anti-CD28 (i.e., 3×28)-conjugated beads, such as DYNABEADS® M-450 CD3/CD28 T, or XCYTE DYNABEADS™ for a time period sufficient for positive selection of the desired T cells. In one example embodiment, the time period is about 30 minutes. In a further embodiment, the time period ranges from 30 minutes to 36 hours or longer and all integer values there between. In a further embodiment, the time period is at least 1, 2, 3, 4, 5, or 6 hours. In yet another preferred embodiment, the time period is 10 to 24 hours. In one preferred embodiment, the incubation time period is 24 hours. For isolation of T cells from patients with leukemia, use of longer incubation times, such as 24 hours, can increase cell yield. Longer incubation times may be used to isolate T cells in any situation where there are few T cells as compared to other cell types, such in isolating tumor infiltrating lymphocytes (TIL) from tumor tissue or from immunocompromised individuals. Further, use of longer incubation times can increase the efficiency of capture of CD8+T cells.

[0673] Enrichment of a T cell population by negative selection can be accomplished with a combination of antibodies directed to surface markers unique to the negatively selected cells. A preferred method is cell sorting and/or selection via negative magnetic immunoadherence or flow cytometry that uses a cocktail of monoclonal antibodies directed to cell surface markers present on the cells negatively selected. For example, to enrich for CD4+ cells by negative selection, a monoclonal antibody cocktail typically includes antibodies to CD14, CD20, CD11b, CD16, HLA-DR, and CD8.

[0674] Further, monocyte populations (e.g., CD14+ cells) may be depleted from blood preparations by a variety of methodologies, including anti-CD14 coated beads or columns, or utilization of the phagocytotic activity of these cells to facilitate removal. Accordingly, in one example embodiment, the invention uses paramagnetic particles of a size sufficient to be engulfed by phagocytotic monocytes. In certain embodiments, the paramagnetic particles are commercially available beads, for example, those produced by Life Technologies under the trade name Dynabeads™. In one example embodiment, other non-specific cells are removed by coating the paramagnetic particles with “irrelevant” proteins (e.g., serum proteins or antibodies). Irrelevant proteins and antibodies include those proteins and antibodies or fragments thereof that do not specifically target the T cells to be isolated. In certain embodiments, the irrelevant beads include beads coated with sheep anti-mouse antibodies, goat anti-mouse antibodies, and human serum albumin.

[0675] In brief, such depletion of monocytes is performed by preincubating T cells isolated from whole blood, apheresed peripheral blood, or tumors with one or more varieties of irrelevant or non-antibody coupled paramagnetic particles at any amount that allows for removal of monocytes (approximately a 20:1 bead:cell ratio) for about 30 minutes to 2 hours at 22 to 37 degrees C., followed by magnetic removal of cells which have attached to or engulfed the paramagnetic particles. Such separation can be performed using standard methods available in the art. For example, any magnetic separation methodology may be used including a variety of which are commercially available, (e.g., DYNAL® Magnetic Particle Concentrator (DYNAL MPC®)). Assurance of requisite depletion can be monitored by a variety of methodologies known to those of ordinary skill in the art, including flow cytometric analysis of CD14 positive cells, before and after depletion.

[0676] For isolation of a desired population of cells by positive or negative selection, the concentration of cells and surface (e.g., particles such as beads) can be varied. In certain embodiments, it may be desirable to significantly decrease the volume in which beads and cells are mixed together (i.e., increase the concentration of cells), to ensure maximum contact of cells and beads. For example, in one example embodiment, a concentration of 2 billion cells/ml is used. In one example embodiment, a concentration of 1 billion cells/ml is used. In a further embodiment, greater than 100 million cells/ml is used. In a further embodiment, a concentration of cells of 10, 15, 20, 25, 30, 35, 40, 45, or 50 million cells/ml is used. In yet another embodiment, a concentration of cells from 75, 80, 85, 90, 95, or 100 million cells/ml is used. In further embodiments, concentrations of 125 or 150 million cells/ml can be used. Using high concentrations can result in increased cell yield, cell activation, and cell expansion. Further, use of high cell concentrations allows more efficient capture of cells that may weakly express target antigens of interest, such as CD28-negative T cells, or from samples where there are many tumor cells present (i.e., leukemic blood, tumor tissue, etc.). Such populations of cells may have therapeutic value and would be desirable to obtain. For example, using high concentration of cells allows more efficient selection of CD8+ T cells that normally have weaker CD28 expression.

[0677] In a related embodiment, it may be desirable to use lower concentrations of cells. By significantly diluting the mixture of T cells and surface (e.g., particles such as beads), interactions between the particles and cells is minimized. This selects for cells that express high amounts of desired antigens to be bound to the particles. For example, CD4+T cells express higher levels of CD28 and are more efficiently captured than CD8+ T cells in dilute concentrations. In one example embodiment, the concentration of cells used is 5×106/ml. In other embodiments, the concentration used can be from about 1×105/ml to 1×106/ml, and any integer value in between.

[0678] T cells can also be frozen. Wishing not to be bound by theory, the freeze and subsequent thaw step provides a more uniform product by removing granulocytes and to some extent monocytes in the cell population. After a washing step to remove plasma and platelets, the cells may be suspended in a freezing solution. While many freezing solutions and parameters are known in the art and will be useful in this context, one method involves using PBS containing 20% DMSO and 8% human serum albumin, or other suitable cell freezing media, the cells then are frozen to −80° C. at a rate of 1° per minute and stored in the vapor phase of a liquid nitrogen storage tank. Other methods of controlled freezing may be used as well as uncontrolled freezing immediately at −20° C. or in liquid nitrogen.

[0679] T cells for use in the present invention may also be antigen-specific T cells. For example, tumor-specific T cells can be used. In certain embodiments, antigen-specific T cells can be isolated from a patient of interest, such as a patient afflicted with a cancer or an infectious disease. In one example embodiment, neoepitopes are determined for a subject and T cells specific to these antigens are isolated. Antigen-specific cells for use in expansion may also be generated in vitro using any number of methods known in the art, for example, as described in U.S. Patent Publication No. US 20040224402 entitled, Generation and Isolation of Antigen-Specific T Cells, or in U.S. Pat. Nos. 6,040,177. Antigen-specific cells for use in the present invention may also be generated using any number of methods known in the art, for example, as described in Current Protocols in Immunology, or Current Protocols in Cell Biology, both published by John Wiley & Sons, Inc., Boston, Mass.

[0680] In a related embodiment, it may be desirable to sort or otherwise positively select (e.g. via magnetic selection) the antigen specific cells prior to or following one or two rounds of expansion. Sorting or positively selecting antigen-specific cells can be carried out using peptide-MHC tetramers (Altman, et al., Science. 1996 Oct. 4; 274(5284):94-6). In another embodiment, the adaptable tetramer technology approach is used (Andersen et al., 2012 Nat Protoc. 7:891-902). Tetramers are limited by the need to utilize predicted binding peptides based on prior hypotheses, and the restriction to specific HLAs. Peptide-MHC tetramers can be generated using techniques known in the art and can be made with any MHC molecule of interest and any antigen of interest as described herein. Specific epitopes to be used in this context can be identified using numerous assays known in the art. For example, the ability of a polypeptide to bind to MHC class I may be evaluated indirectly by monitoring the ability to promote incorporation of 1251 labeled p2-microglobulin ((32m) into MHC class I/P2m/peptide heterotrimeric complexes (see Parker et al., J. Immunol. 152:163, 1994).

[0681] In one example embodiment cells are directly labeled with an epitope-specific reagent for isolation by flow cytometry followed by characterization of phenotype and TCRs. In one example embodiment, T cells are isolated by contacting with T cell specific antibodies. Sorting of antigen-specific T cells, or generally any cells of the present invention, can be carried out using any of a variety of commercially available cell sorters, including, but not limited to, MoFlo sorter (DakoCytomation, Fort Collins, Colo.), FACSAria™, FACSArray™ FACSVantage™, BD™ LSR II, and FACSCalibur™ (BD Biosciences, San Jose, Calif.).

[0682] In a preferred embodiment, the method comprises selecting cells that also express CD3. The method may comprise specifically selecting the cells in any suitable manner. Preferably, the selecting is carried out using flow cytometry. The flow cytometry may be carried out using any suitable method known in the art. The flow cytometry may employ any suitable antibodies and stains. Preferably, the antibody is chosen such that it specifically recognizes and binds to the particular biomarker being selected. For example, the specific selection of CD3, CD8, TIM-3, LAG-3, 4-1BB, or PD-1 may be carried out using anti-CD3, anti-CD8, anti-TIM-3, anti-LAG-3, anti-4-1BB, or anti-PD-1 antibodies, respectively. The antibody or antibodies may be conjugated to a bead (e.g., a magnetic bead) or to a fluorochrome. Preferably, the flow cytometry is fluorescence-activated cell sorting (FACS). TCRs expressed on T cells can be selected based on reactivity to autologous tumors. Additionally, T cells that are reactive to tumors can be selected for based on markers using the methods described in patent publication Nos. WO2014133567 and WO2014133568, herein incorporated by reference in their entirety. Additionally, activated T cells can be selected for based on surface expression of CD107a

[0683] In one example embodiment of the invention, the method further comprises expanding the numbers of T cells in the enriched cell population. Such methods are described in U.S. Pat. No. 8,637,307 and is herein incorporated by reference in its entirety. The numbers of T cells may be increased at least about 3-fold (or 4-, 5-, 6-, 7-, 8-, or 9-fold), more preferably at least about 10-fold (or 20-, 30-, 40-, 50-, 60-, 70-, 80-, or 90-fold), more preferably at least about 100-fold, more preferably at least about 1,000 fold, or most preferably at least about 100,000-fold. The numbers of T cells may be expanded using any suitable method known in the art. Exemplary methods of expanding the numbers of cells are described in patent publication No. WO 2003057171, U.S. Pat. No. 8,034,334, and U.S. Patent Application Publication No. 2012/0244133, each of which is incorporated herein by reference.

[0684] In one example embodiment, ex vivo T cell expansion can be performed by isolation of T cells and subsequent stimulation or activation followed by further expansion. In one example embodiment of the invention, the T cells may be stimulated or activated by a single agent. In another embodiment, T cells are stimulated or activated with two agents, one that induces a primary signal and a second that is a co-stimulatory signal. Ligands useful for stimulating a single signal or stimulating a primary signal and an accessory molecule that stimulates a second signal may be used in soluble form. Ligands may be attached to the surface of a cell, to an Engineered Multivalent Signaling Platform (EMSP), or immobilized on a surface. In a preferred embodiment both primary and secondary agents are co-immobilized on a surface, for example a bead or a cell. In one example embodiment, the molecule providing the primary activation signal may be a CD3 ligand, and the co-stimulatory molecule may be a CD28 ligand or 4-1BB ligand.

[0685] In certain embodiments, T cells comprising a CAR or an exogenous TCR, may be manufactured as described in WO2015120096, by a method comprising: enriching a population of lymphocytes obtained from a donor subject; stimulating the population of lymphocytes with one or more T-cell stimulating agents to produce a population of activated T cells, wherein the stimulation is performed in a closed system using serum-free culture medium; transducing the population of activated T cells with a viral vector comprising a nucleic acid molecule which encodes the CAR or TCR, using a single cycle transduction to produce a population of transduced T cells, wherein the transduction is performed in a closed system using serum-free culture medium; and expanding the population of transduced T cells for a predetermined time to produce a population of engineered T cells, wherein the expansion is performed in a closed system using serum-free culture medium. In certain embodiments, T cells comprising a CAR or an exogenous TCR, may be manufactured as described in WO2015120096, by a method comprising: obtaining a population of lymphocytes; stimulating the population of lymphocytes with one or more stimulating agents to produce a population of activated T cells, wherein the stimulation is performed in a closed system using serum-free culture medium; transducing the population of activated T cells with a viral vector comprising a nucleic acid molecule which encodes the CAR or TCR, using at least one cycle transduction to produce a population of transduced T cells, wherein the transduction is performed in a closed system using serum-free culture medium; and expanding the population of transduced T cells to produce a population of engineered T cells, wherein the expansion is performed in a closed system using serum-free culture medium. The predetermined time for expanding the population of transduced T cells may be 3 days. The time from enriching the population of lymphocytes to producing the engineered T cells may be 6 days. The closed system may be a closed bag system. Further provided is population of T cells comprising a CAR or an exogenous TCR obtainable or obtained by said method, and a pharmaceutical composition comprising such cells.

[0686] In certain embodiments, T cell maturation or differentiation in vitro may be delayed or inhibited by the method as described in WO2017070395, comprising contacting one or more T cells from a subject in need of a T cell therapy with an AKT inhibitor (such as, e.g., one or a combination of two or more AKT inhibitors disclosed in claim 8 of WO2017070395) and at least one of exogenous Interleukin-7 (IL-7) and exogenous Interleukin-15 (IL-15), wherein the resulting T cells exhibit delayed maturation or differentiation, and/or wherein the resulting T cells exhibit improved T cell function (such as, e.g., increased T cell proliferation; increased cytokine production; and/or increased cytolytic activity) relative to a T cell function of a T cell cultured in the absence of an AKT inhibitor.

[0687] In certain embodiments, a patient in need of a T cell therapy may be conditioned by a method as described in WO2016191756 comprising administering to the patient a dose of cyclophosphamide between 200 mg/m2/day and 2000 mg/m2/day and a dose of fludarabine between 20 mg/m2/day and 900 mg/m²/day.

### Treating and Preventing Diseases Using RNA Editing

[0688] In one example embodiment, the disease, disorder, and/condition or symptom thereof can be treated or prevented using a composition or system described herein. In one example embodiment, the composition, system, described herein is a nucleic acid editing system. In one example embodiment, treatment or prevention using a composition or system described herein can have the advantage of less immunogenicity than a nucleic acid editing composition, system, and is not as hindered by limitations on viral vector packaging size. Further, as the effect is transient, the effect can be better controlled over time and can potentially be reversible. Thus, they pose less risk of causing permeant detrimental effects than nucleic acid editing-based preventatives and treatments.

[0689] Any disease involving a dysfunctional nucleic acid molecule, where the dysfunction is the result of a mutation in the nucleic acid sequence can be treated or prevented by modifying its sequence using a composition, system, capable of nucleic acid modification described elsewhere herein. In one example embodiment, the disease that can be treated or prevented using a composition, system, capable of RNA modification can be one or more of those listed in Tables 9-10, or a combination thereof. In one example embodiment, the coding sequence for the gene involved in the disease is greater than the packaging capacity of a viral vector system, particularly an AAV vector system.

[0690] The potential for RNA editing has now been demonstrated in vitro and in vivo for pathogenic mutations in genes related to cystic fibrosis, Duchenne's muscular dystrophy, Hurler's syndrome, and Ornithine transcarbamylase (OTC) deficiency, among others. See e.g. Katrekar et al. Nat. Methods. 2019. 16:239-242; Montieel-Gonzalez et al. 2013. PNAS USA. 110: 18285-18290; Sinnamon et al. PNAS USA 2017; Wettengel et al. Curr. Gene Ther. 2018, 18:31-39; Qu et al. BioRxiv. 2019., 605972; and Fry et al. 2020. Int. J. Mol. Sci. 12:777, which are incorporated by reference as if expressed in their entirety here and the teachings of which can be adapted in view of the description herein to the CRISPR-Cas Systems described herein.

[0691] In one example embodiment, the disease is an inherited retinal degeneration disease. In one example embodiment, gene whose transcript can be modified using a composition, system, described herein capable of nucleic acid modification that is associated with inherited retinal degeneration and whose coding sequence is too large for packaging in a single AAV can be ABC4, USH2A, CEP290, MYO7A, EYS, and CDH23.

### Models of Diseases and Conditions

[0692] In an aspect, the invention provides a method of modeling a disease associated with a genomic locus in a eukaryotic organism or a non-human organism comprising manipulation of a target sequence within a coding, non-coding or regulatory element of said genomic locus comprising delivering a non-naturally occurring or engineered composition comprising a viral vector system comprising one or more viral vectors operably encoding a composition for expression thereof, wherein the composition comprises particle delivery system or the delivery system or the virus particle of any one of the above embodiments or the cell of any one of the above embodiment.

[0693] In one aspect, the invention provides a method of generating a model eukaryotic cell that can include one or more a mutated disease genes and/or infectious microorganisms. In one example embodiment, a disease gene is any gene associated an increase in the risk of having or developing a disease. In one example embodiment, the method includes (a) introducing one or more vectors into a eukaryotic cell, wherein the one or more vectors comprise a composition, system, and/or component thereof and/or a vector or vector system that is capable of driving expression of a composition, system, and/or component thereof including, but not limited to: a guide sequence optionally linked to a tracr mate sequence, a tracr sequence, one or more Cas effectors, and combinations thereof and (b) allowing a composition, system, or complex to bind to one or more target polynucleotides, e.g., to effect cleavage, nicking, or other modification of the target polynucleotide within said disease gene, wherein the composition, system, or complex is composed of one or more CRISPR-Cas effectors complexed with (1) one or more guide sequences that is/are hybridized to the target sequence(s) within the target polynucleotide(s), and optionally (2) the tracr mate sequence(s) that is/are hybridized to the tracr sequence(s), thereby generating a model eukaryotic cell comprising one or more mutated disease gene(s). Thus, in one example embodiment the composition, system, contains nucleic acid molecules for and drives expression of one or more of: a Cas effector, a guide sequence linked to a tracr mate sequence, and a tracr sequence and/or a Homologous Recombination template and/or a stabilizing ligand if the Cas effector has a destabilization domain. In one example embodiment, said cleavage comprises cleaving one or two strands at the location of the target sequence by the Cas effector(s). In one example embodiment, nicking comprises nicking one or two strands at the location of the target sequence by the Cas effector(s). In one example embodiment, said cleavage or nicking results in modified transcription of a target polynucleotide. In one example embodiment, modification results in decreased transcription of the target polynucleotide. In one example embodiment, the method further comprises repairing said cleaved or nicked target polynucleotide by homologous recombination with an exogenous template polynucleotide, wherein said repair results in a mutation comprising an insertion, deletion, or substitution of one or more nucleotides of said target polynucleotide. In one example embodiment, said mutation results in one or more amino acid changes in a protein expression from a gene comprising the target sequence.

[0694] The disease modeled can be any disease with a genetic or epigenetic component. In one example embodiment, the disease modeled can be any as discussed elsewhere herein, including but not limited to any as set forth in Tables 9 and 10 herein.

### In Situ Disease Detection

[0695] The compositions, systems, and/or components thereof can be used for diagnostic methods of detection such as in CASFISH (see e.g. Deng et al. 2015. PNAS USA 112(38): 11870-11875), CRISPR-Live FISH (see e.g. Wang et al. 2020. Science; 365(6459):1301-1305), sm-FISH (Lee and Jefcoate. 2017. Front. Endocrinol. doi.org/10.3389/fendo.2017.00289), sequential FISH CRISPRainbow (Ma et al. Nat Biotechnol, 34 (2016), pp. 528-530), CRISPR-Sirius (Nat Methods, 15 (2018), pp. 928-931), Casilio (Cheng et al. Cell Res, 26 (2016), pp. 254-257), Halo-Tag based genomic loci visualization techniques (e.g. Deng et al. 2015. PNAS USA 112(38): 11870-11875; Knight et al., Science, 350 (2015), pp. 823-826), RNA-aptamer based methods (e.g. Ma et al., J Cell Biol, 214 (2016), pp. 529-537), molecular beacon-based methods (e.g. Zhao et al. Biomaterials, 100 (2016), pp. 172-183; Wu et al. Nucleic Acids Res (2018)), Quantum Dot-based systems (e.g. Ma et al. Anal Chem, 89 (2017), pp. 12896-12901), multiplexed methods (e.g. Ma et al., Proc Natl Acad Sci USA, 112 (2015), pp. 3002-3007; Fu et al. Nat Commun, 7 (2016), p. 11707; Ma et al. Nat Biotechnol, 34 (2016), pp. 528-530; Shao et al. Nucleic Acids Res, 44 (2016), Article e86); Wang et al. Sci Rep, 6 (2016), p. 26857), c, and other in situ CRISPR-hybridization based methods (e.g. Chen et al. Cell, 155 (2013), pp. 1479-1491; Gu et al. Science, 359 (2018), pp. 1050-1055; Tanebaum et al. Cell, 159 (2014), pp. 635-646; Ye et al. Protein Cell, 8 (2017), pp. 853-855; Chen et al. Nat Commun, 9 (2018), p. 5065; Shao et al. ACS Synth Biol (2017); Fu et al. Nat Commun, 7 (2016), p. 11707; Shao et al. Nucleic Acids Res, 44 (2016), Article e86; Wang et al., Sci Rep, 6 (2016), p. 26857), all of which are incorporated by reference herein as if expressed in their entirety and whose teachings can be adapted to the compositions, systems, and components thereof described herein in view of the description herein.

[0696] In one example embodiment, the composition, system, or component thereof can be used in a detection method, such as an in situ detection method described herein. In one example embodiment, the composition, system, or component thereof can include a catalytically inactivate Cas effector described herein and use this system in detection methods such as fluorescence in situ hybridization (FISH) or any other described herein. In one example embodiment, the inactivated Cas effector, which lacks the ability to produce DNA double-strand breaks may be with a marker, such as fluorescent protein, such as the enhanced green fluorescent protein (eEGFP) and co-expressed with small guide RNAs to target pericentric, centric and telomeric repeats in vivo. The dCas effector or system thereof can be used to visualize both repetitive sequences and individual genes in the human genome. Such new applications of labelled dCas effector and compositions, systems, thereof can be important in imaging cells and studying the functional nuclear architecture, especially in cases with a small nucleus volume or complex 3-D structures.

### Cell Selection

[0697] In one example embodiment, the compositions, systems, and/or components thereof described herein can be used in a method to screen and/or select cells. In one example embodiment, composition, system,-based screening/selection method can be used to identify diseased cells in a cell population. In one example embodiment, selection of the cells results in a modification in the cells such that the selected cells die. In this way, diseased cells can be identified, and removed from the healthy cell population. In one example embodiment, the diseased cells can be a cancer cell, pre-cancerous cell, a virus or other pathogenic organism infected cells, or otherwise abnormal cell. In one example embodiment, the modification can impart another detectable change in the cells to be selected (e.g. a functional change and/or genomic barcode) that facilitates selection of the desired cells. In one example embodiment a negative selection scheme can be used to obtain a desired cell population. In these embodiments, the cells to be selected against are modified, thus can be removed from the cell population based on their death or identification or sorting based the detectable change imparted on the cells. Thus, in these embodiments, the remaining cells after selection are the desired cell population.

[0698] In one example embodiment, a method of selecting one or more cell(s) containing a polynucleotide modification can include: introducing one or more composition, system,(s) and/or components thereof, and/or vectors or vector systems into the cell(s), wherein the composition, system,(s) and/or components thereof, and/or vectors or vector systems contains and/or is capable of expressing one or more of: a Cas effector, a guide sequence optionally linked to a tracr mate sequence, a tracr sequence, and an editing template; wherein, for example that which is being expressed is within and expressed in vivo by the composition, system, vector or vector system and/or the editing template comprises the one or more mutations that abolish Cas effector cleavage; allowing homologous recombination of the editing template with the target polynucleotide in the cell(s) to be selected; allowing a composition, system, or complex to bind to a target polynucleotide to effect cleavage of the target polynucleotide within said gene, wherein the AAV-CAST complex comprises the Cas effector complexed with (1) the guide sequence that is hybridized to the target sequence within the target polynucleotide, and (2) the tracr mate sequence that is hybridized to the tracr sequence, wherein binding of the complex to the target polynucleotide induces cell death or imparts some other detectable change to the cell, thereby allowing one or more cell(s) in which one or more mutations have been introduced to be selected. In one example embodiment, the cell to be selected may be a eukaryotic cell. In one example embodiment, the cell to be selected may be a prokaryotic cell. Selection of specific cells via the methods herein can be performed without requiring a selection marker or a two-step process that may include a counter-selection system.

### Therapeutic Agent Development

[0699] The compositions, systems, and components thereof described herein can be used to develop CRISPR-Cas-based and non-CRISPR-Cas-based biologically active agents, such as small molecule therapeutics. Thus, described herein are methods for developing a biologically active agent that modulates a cell function and/or signaling event associated with a disease and/or disease gene. In one example embodiment, the method comprises (a) contacting a test compound with a diseased cell and/or a cell containing a disease gene cell; and (b) detecting a change in a readout that is indicative of a reduction or an augmentation of a cell signaling event or other cell functionality associated with said disease or disease gene, thereby developing said biologically active agent that modulates said cell signaling event or other functionality associated with said disease gene. In one example embodiment, the diseased cell is a model cell described elsewhere herein. In one example embodiment, the diseased cell is a diseased cell isolated from a subject in need of treatment. In one example embodiment, the test compound is a small molecule agent. In one example embodiment, test compound is a small molecule agent. In one example embodiment, the test compound is a biologic molecule agent.

[0700] In one example embodiment, the method involves developing a therapeutic based on the composition, system, described herein. In particular embodiments, the therapeutic comprises a Cas effector and/or a guide RNA capable of hybridizing to a target sequence of interest. In particular embodiments, the therapeutic is a vector or vector system that can contain a) a first regulatory element operably linked to a nucleotide sequence encoding the Cas effector protein(s); and b) a second regulatory element operably linked to one or more nucleotide sequences encoding one or more nucleic acid molecules comprising a guide RNA comprising a guide sequence, a direct repeat sequence; wherein components (a) and (b) are located on same or different vectors. In particular embodiments, the biologically active agent is a composition comprising a delivery system operably configured to deliver composition, system, or components thereof, and/or or one or more polynucleotide sequences, vectors, or vector systems containing or encoding said components into a cell and capable of forming a complex with the components of the composition and system herein, and wherein said complex is operable in the cell. In one example embodiment, the complex can include the Cas effector protein(s) as described herein, guide RNA comprising the guide sequence, and a direct repeat sequence. In any such compositions, the delivery system can be a yeast system, a lipofection system, a microinjection system, a biolistic system, virosomes, liposomes, immunoliposomes, polycations, lipid:nucleic acid conjugates or artificial virions, or any other system as described herein. In particular embodiments, the delivery is via a particle, a nanoparticle, a lipid or a cell penetrating peptide (CPP).

[0701] Also described herein are methods for developing or designing a composition, system, optionally a composition, system, based therapy or therapeutic, comprising (a) selecting for a (therapeutic) locus of interest gRNA target sites, wherein said target sites have minimal sequence variation across a population, and from said selected target sites subselecting target sites, wherein a gRNA directed against said target sites recognizes a minimal number of off-target sites across said population, or (b) selecting for a (therapeutic) locus of interest gRNA target sites, wherein said target sites have minimal sequence variation across a population, or selecting for a (therapeutic) locus of interest gRNA target sites, wherein a gRNA directed against said target sites recognizes a minimal number of off-target sites across said population, and optionally estimating the number of (sub)selected target sites needed to treat or otherwise modulate or manipulate a population, and optionally validating one or more of the (sub)selected target sites for an individual subject, optionally designing one or more gRNA recognizing one or more of said (sub)selected target sites.

[0702] In one example embodiment, the method for developing or designing a gRNA for use in a composition, system, optionally a composition, system, based therapy or therapeutic, can include (a) selecting for a (therapeutic) locus of interest gRNA target sites, wherein said target sites have minimal sequence variation across a population, and from said selected target sites subselecting target sites, wherein a gRNA directed against said target sites recognizes a minimal number of off-target sites across said population, or (b) selecting for a (therapeutic) locus of interest gRNA target sites, wherein said target sites have minimal sequence variation across a population, or selecting for a (therapeutic) locus of interest gRNA target sites, wherein a gRNA directed against said target sites recognizes a minimal number of off-target sites across said population, and optionally estimating the number of (sub)selected target sites needed to treat or otherwise modulate or manipulate a population, optionally validating one or more of the (sub)selected target sites for an individual subject, optionally designing one or more gRNA recognizing one or more of said (sub)selected target sites.

[0703] In one example embodiment, the method for developing or designing a composition, system, optionally a composition, system, based therapy or therapeutic in a population, can include (a) selecting for a (therapeutic) locus of interest gRNA target sites, wherein said target sites have minimal sequence variation across a population, and from said selected target sites subselecting target sites, wherein a gRNA directed against said target sites recognizes a minimal number of off-target sites across said population, or (b) selecting for a (therapeutic) locus of interest gRNA target sites, wherein said target sites have minimal sequence variation across a population, or selecting for a (therapeutic) locus of interest gRNA target sites, wherein a gRNA directed against said target sites recognizes a minimal number of off-target sites across said population, and optionally estimating the number of (sub)selected target sites needed to treat or otherwise modulate or manipulate a population, optionally validating one or more of the (sub)selected target sites for an individual subject, optionally designing one or more gRNA recognizing one or more of said (sub)selected target sites.

[0704] In one example embodiment the method for developing or designing a gRNA for use in a composition, system, optionally a composition, system, based therapy or therapeutic in a population, can include (a) selecting for a (therapeutic) locus of interest gRNA target sites, wherein said target sites have minimal sequence variation across a population, and from said selected target sites subselecting target sites, wherein a gRNA directed against said target sites recognizes a minimal number of off-target sites across said population, or (b) selecting for a (therapeutic) locus of interest gRNA target sites, wherein said target sites have minimal sequence variation across a population, or selecting for a (therapeutic) locus of interest gRNA target sites, wherein a gRNA directed against said target sites recognizes a minimal number of off-target sites across said population, and optionally estimating the number of (sub)selected target sites needed to treat or otherwise modulate or manipulate a population, optionally validating one or more of the (sub)selected target sites for an individual subject, optionally designing one or more gRNA recognizing one or more of said (sub)selected target sites.

[0705] In one example embodiment, the method for developing or designing a composition, system, such as a composition, system, based therapy or therapeutic, optionally in a population; or for developing or designing a gRNA for use in a composition, system, optionally a composition, system, based therapy or therapeutic, optionally in a population, can include: selecting a set of target sequences for one or more loci in a target population, wherein the target sequences do not contain variants occurring above a threshold allele frequency in the target population (i.e. platinum target sequences); removing from said selected (platinum) target sequences any target sequences having high frequency off-target candidates (relative to other (platinum) targets in the set) to define a final target sequence set; preparing one or more, such as a set of compositions, systems, based on the final target sequence set, optionally wherein a number of CRISP-Cas systems prepared is based (at least in part) on the size of a target population.

[0706] In certain embodiments, off-target candidates/off-targets, PAM restrictiveness, target cleavage efficiency, or effector protein specificity is identified or determined using a sequencing-based double-strand break (DSB) detection assay, such as described herein elsewhere. In certain embodiments, off-target candidates/off-targets are identified or determined using a sequencing-based double-strand break (DSB) detection assay, such as described herein elsewhere. In certain embodiments, off-targets, or off target candidates have at least 1, preferably 1-3, mismatches or (distal) PAM mismatches, such as 1 or more, such as 1, 2, 3, or more (distal) PAM mismatches. In certain embodiments, sequencing-based DSB detection assay comprises labeling a site of a DSB with an adapter comprising a primer binding site, labeling a site of a DSB with a barcode or unique molecular identifier, or combination thereof, as described herein elsewhere.

[0707] It will be understood that the guide sequence of the gRNA is 100% complementary to the target site, i.e. does not comprise any mismatch with the target site. It will be further understood that “recognition” of an (off-)target site by a gRNA presupposes composition, system, functionality, i.e. an (off-)target site is only recognized by a gRNA if binding of the gRNA to the (off-)target site leads to composition, system, activity (such as induction of single or double strand DNA cleavage, transcriptional modulation, etc.).

[0708] In certain embodiments, the target sites having minimal sequence variation across a population are characterized by absence of sequence variation in at least 99%, preferably at least 99.9%, more preferably at least 99.99% of the population. In certain embodiments, optimizing target location comprises selecting target sequences or loci having an absence of sequence variation in at least 99%, %, preferably at least 99.9%, more preferably at least 99.99% of a population. These targets are referred to herein elsewhere also as “platinum targets”. In certain embodiments, said population comprises at least 1000 individuals, such as at least 5000 individuals, such as at least 10000 individuals, such as at least 50000 individuals.

[0709] In certain embodiments, the off-target sites are characterized by at least one mismatch between the off-target site and the gRNA. In certain embodiments, the off-target sites are characterized by at most five, preferably at most four, more preferably at most three mismatches between the off-target site and the gRNA. In certain embodiments, the off-target sites are characterized by at least one mismatch between the off-target site and the gRNA and by at most five, preferably at most four, more preferably at most three mismatches between the off-target site and the gRNA.

[0710] In certain embodiments, said minimal number of off-target sites across said population is determined for high-frequency haplotypes in said population. In certain embodiments, said minimal number of off-target sites across said population is determined for high-frequency haplotypes of the off-target site locus in said population. In certain embodiments, said minimal number of off-target sites across said population is determined for high-frequency haplotypes of the target site locus in said population. In certain embodiments, the high-frequency haplotypes are characterized by occurrence in at least 0.1% of the population.

[0711] In certain embodiments, the number of (sub)selected target sites needed to treat a population is estimated based on based low frequency sequence variation, such as low frequency sequence variation captured in large scale sequencing datasets. In certain embodiments, the number of (sub)selected target sites needed to treat a population of a given size is estimated.

[0712] In certain embodiments, the method further comprises obtaining genome sequencing data of a subject to be treated; and treating the subject with a composition, system, selected from the set of compositions, systems, wherein the composition, system, selected is based (at least in part) on the genome sequencing data of the individual. In certain embodiments, the ((sub)selected) target is validated by genome sequencing, preferably whole genome sequencing.

[0713] In certain embodiments, target sequences or loci as described herein are (further) selected based on optimization of one or more parameters, such as PAM type (natural or modified), PAM nucleotide content, PAM length, target sequence length, PAM restrictiveness, target cleavage efficiency, and target sequence position within a gene, a locus or other genomic region. Methods of optimization are discussed in greater detail elsewhere herein.

[0714] In certain embodiments, target sequences or loci as described herein are (further) selected based on optimization of one or more of target loci location, target length, target specificity, and PAM characteristics. As used herein, PAM characteristics may comprise for instance PAM sequence, PAM length, and/or PAM GC contents. In certain embodiments, optimizing PAM characteristics comprises optimizing nucleotide content of a PAM. In certain embodiments, optimizing nucleotide content of PAM is selecting a PAM with a motif that maximizes abundance in the one or more target loci, minimizes mutation frequency, or both. Minimizing mutation frequency can for instance be achieved by selecting PAM sequences devoid of or having low or minimal CpG.

[0715] In certain embodiments, the effector protein for each composition, system, in the set of compositions, systems, is selected based on optimization of one or more parameters selected from the group consisting of; effector protein size, ability of effector protein to access regions of high chromatin accessibility, degree of uniform enzyme activity across genomic targets, epigenetic tolerance, mismatch/budge tolerance, effector protein specificity, effector protein stability or half-life, effector protein immunogenicity or toxicity. Methods of optimization are discussed in greater detail elsewhere herein.

### Optimization of the Systems

[0716] The methods of the present invention can involve optimization of selected parameters or variables associated with the composition, system, and/or its functionality, as described herein further elsewhere. Optimization of the composition, system, in the methods as described herein may depend on the target(s), such as the therapeutic target or therapeutic targets, the mode or type of composition, system, modulation, such as composition, system, based therapeutic target(s) modulation, modification, or manipulation, as well as the delivery of the composition, system, components. One or more targets may be selected, depending on the genotypic and/or phenotypic outcome. For instance, one or more therapeutic targets may be selected, depending on (genetic) disease etiology or the desired therapeutic outcome. The (therapeutic) target(s) may be a single gene, locus, or other genomic site, or may be multiple genes, loci or other genomic sites. As is known in the art, a single gene, locus, or other genomic site may be targeted more than once, such as by use of multiple gRNAs.

[0717] The activity of the composition and/or system, such as CRISPR-Cas or CAST system-based therapy or therapeutics may involve target disruption, such as target mutation, such as leading to gene knockout. The activity of the composition and/or system, such as CRISPR-Cas or CAST system-based therapy or therapeutics may involve replacement of particular target sites, such as leading to target correction. CRISPR-Cas or CAST system-based therapy or therapeutics may involve removal of particular target sites, such as leading to target deletion. The activity of the composition and/or system, such as CRISPR-Cas or CAST system-based therapy or therapeutics may involve modulation of target site functionality, such as target site activity or accessibility, leading for instance to (transcriptional and/or epigenetic) gene or genomic region activation or gene or genomic region silencing. The skilled person will understand that modulation of target site functionality may involve CRISPR effector mutation (such as for instance generation of a catalytically inactive CRISPR effector) and/or functionalization (such as for instance fusion of the CRISPR effector with a heterologous functional domain, such as a transcriptional activator or repressor), as described herein elsewhere.

[0718] Accordingly, in an aspect, the invention relates to a method as described herein, comprising selection of one or more (therapeutic) target, selecting one or more functionality of the composition and/or system, and optimization of selected parameters or variables associated with the CRISPR-Cas or CAST system and/or its functionality. In a related aspect, the invention relates to a method as described herein, comprising (a) selecting one or more (therapeutic) target loci, (b) selecting one or more CRISPR-Cas system functionalities, (c) optionally selecting one or more modes of delivery, and preparing, developing, or designing a CRISPR-Cas system or CAST selected based on steps (a)-(c).

[0719] In certain embodiments, the functionality of the composition and/or system comprises genomic mutation. In certain embodiments, the functionality of the composition and/or system comprises single genomic mutation. In certain embodiments, the functionality of the composition and/or system functionality comprises multiple genomic mutation. In certain embodiments, the functionality of the composition and/or system comprises gene knockout. In certain embodiments, the functionality of the composition and/or system comprises single gene knockout. In certain embodiments, the functionality of the composition and/or system comprises multiple gene knockout. In certain embodiments, the functionality of the composition and/or system comprises gene correction. In certain embodiments, the functionality of the composition and/or system comprises single gene correction. In certain embodiments, the functionality of the composition and/or system comprises multiple gene correction. In certain embodiments, the functionality of the composition and/or system comprises genomic region correction. In certain embodiments, the functionality of the composition and/or system comprises single genomic region correction. In certain embodiments, the functionality of the composition and/or system comprises multiple genomic region correction. In certain embodiments, the functionality of the composition and/or system comprises gene deletion. In certain embodiments, the functionality of the composition and/or system comprises single gene deletion. In certain embodiments, the functionality of the composition and/or system comprises multiple gene deletion. In certain embodiments, the functionality of the composition and/or system comprises genomic region deletion. In certain embodiments, the functionality of the composition and/or system comprises single genomic region deletion. In certain embodiments, the functionality of the composition and/or system comprises multiple genomic region deletion. In certain embodiments, the functionality of the composition and/or system comprises modulation of gene or genomic region functionality. In certain embodiments, the functionality of the composition and/or system comprises modulation of single gene or genomic region functionality. In certain embodiments, the functionality of the composition and/or system comprises modulation of multiple gene or genomic region functionality. In certain embodiments, the functionality of the composition and/or system comprises gene or genomic region functionality, such as gene or genomic region activity. In certain embodiments, the functionality of the composition and/or system comprises single gene or genomic region functionality, such as gene or genomic region activity. In certain embodiments, the functionality of the composition and/or system comprises multiple gene or genomic region functionality, such as gene or genomic region activity. In certain embodiments, the functionality of the composition and/or system comprises modulation gene activity or accessibility optionally leading to transcriptional and/or epigenetic gene or genomic region activation or gene or genomic region silencing. In certain embodiments, the functionality of the composition and/or system comprises modulation single gene activity or accessibility optionally leading to transcriptional and/or epigenetic gene or genomic region activation or gene or genomic region silencing. In certain embodiments, the functionality of the composition and/or system comprises modulation multiple gene activity or accessibility optionally leading to transcriptional and/or epigenetic gene or genomic region activation or gene or genomic region silencing.

[0720] Optimization of selected parameters or variables in the methods as described herein may result in optimized or improved the system, such as CRISPR-Cas or CAST system-based therapy or therapeutic, specificity, efficacy, and/or safety. In certain embodiments, one or more of the following parameters or variables are taken into account, are selected, or are optimized in the methods of the invention as described herein: Cas protein allosteric interactions, Cas protein functional domains and functional domain interactions, CRISPR effector specificity, gRNA specificity, CRISPR-Cas complex specificity, PAM restrictiveness, PAM type (natural or modified), PAM nucleotide content, PAM length, CRISPR effector activity, gRNA activity, CRISPR-Cas complex activity, target cleavage efficiency, target site selection, target sequence length, ability of effector protein to access regions of high chromatin accessibility, degree of uniform enzyme activity across genomic targets, epigenetic tolerance, mismatch/budge tolerance, CRISPR effector stability, CRISPR effector mRNA stability, gRNA stability, CRISPR-Cas or CAST complex stability, CRISPR effector protein or mRNA immunogenicity or toxicity, gRNA immunogenicity or toxicity, CRISPR-Cas complex immunogenicity or toxicity, CRISPR effector protein or mRNA dose or titer, gRNA dose or titer, CRISPR-Cas or CAST complex dose or titer, CRISPR effector protein size, CRISPR effector expression level, gRNA expression level, CRISPR-Cas or CAST complex expression level, CRISPR effector spatiotemporal expression, gRNA spatiotemporal expression, CRISPR-Cas or CAST complex spatiotemporal expression.

[0721] By means of example, and without limitation, parameter or variable optimization may be achieved as follows. CRISPR effector specificity may be optimized by selecting the most specific CRISPR effector. This may be achieved for instance by selecting the most specific CRISPR effector orthologue or by specific CRISPR effector mutations which increase specificity. gRNA specificity may be optimized by selecting the most specific gRNA. This can be achieved for instance by selecting gRNA having low homology, i.e. at least one or preferably more, such as at least 2, or preferably at least 3, mismatches to off-target sites. CRISPR-Cas complex specificity may be optimized by increasing CRISPR effector specificity and/or gRNA specificity as above. PAM restrictiveness may be optimized by selecting a CRISPR effector having to most restrictive PAM recognition. This can be achieved for instance by selecting a CRISPR effector orthologue having more restrictive PAM recognition or by specific CRISPR effector mutations which increase or alter PAM restrictiveness. PAM type may be optimized for instance by selecting the appropriate CRISPR effector, such as the appropriate CRISPR effector recognizing a desired PAM type. The CRISPR effector or PAM type may be naturally occurring or may for instance be optimized based on CRISPR effector mutants having an altered PAM recognition, or PAM recognition repertoire. PAM nucleotide content may for instance be optimized by selecting the appropriate CRISPR effector, such as the appropriate CRISPR effector recognizing a desired PAM nucleotide content. The CRISPR effector or PAM type may be naturally occurring or may for instance be optimized based on CRISPR effector mutants having an altered PAM recognition, or PAM recognition repertoire. PAM length may for instance be optimized by selecting the appropriate CRISPR effector, such as the appropriate CRISPR effector recognizing a desired PAM nucleotide length. The CRISPR effector or PAM type may be naturally occurring or may for instance be optimized based on CRISPR effector mutants having an altered PAM recognition, or PAM recognition repertoire.

[0722] Target length or target sequence length may for instance be optimized by selecting the appropriate CRISPR effector, such as the appropriate CRISPR effector recognizing a desired target or target sequence nucleotide length. Alternatively, or in addition, the target (sequence) length may be optimized by providing a target having a length deviating from the target (sequence) length typically associated with the CRISPR effector, such as the naturally occurring CRISPR effector. The CRISPR effector or target (sequence) length may be naturally occurring or may for instance be optimized based on CRISPR effector mutants having an altered target (sequence) length recognition, or target (sequence) length recognition repertoire. For instance, increasing or decreasing target (sequence) length may influence target recognition and/or off-target recognition. CRISPR effector activity may be optimized by selecting the most active CRISPR effector. This may be achieved for instance by selecting the most active CRISPR effector orthologue or by specific CRISPR effector mutations which increase activity. The ability of the CRISPR effector protein to access regions of high chromatin accessibility, may be optimized by selecting the appropriate CRISPR effector or mutant thereof, and can consider the size of the CRISPR effector, charge, or other dimensional variables etc. The degree of uniform CRISPR effector activity may be optimized by selecting the appropriate CRISPR effector or mutant thereof, and can consider CRISPR effector specificity and/or activity, PAM specificity, target length, mismatch tolerance, epigenetic tolerance, CRISPR effector and/or gRNA stability and/or half-life, CRISPR effector and/or gRNA immunogenicity and/or toxicity, etc. gRNA activity may be optimized by selecting the most active gRNA. In one example embodiment, this can be achieved by increasing gRNA stability through RNA modification. CRISPR-Cas complex activity may be optimized by increasing CRISPR effector activity and/or gRNA activity as above.

[0723] The target site selection may be optimized by selecting the optimal position of the target site within a gene, locus or other genomic region. The target site selection may be optimized by optimizing target location comprises selecting a target sequence with a gene, locus, or other genomic region having low variability. This may be achieved for instance by selecting a target site in an early and/or conserved exon or domain (i.e. having low variability, such as polymorphisms, within a population).

[0724] In certain embodiments, optimizing target (sequence) length comprises selecting a target sequence within one or more target loci between 5 and 25 nucleotides. In certain embodiments, a target sequence is 20 nucleotides.

[0725] In certain embodiments, optimizing target specificity comprises selecting targets loci that minimize off-target candidates.

[0726] In one example embodiment, the target site may be selected by minimization of off-target effects (e.g. off-targets qualified as having 1-5, 1-4, or preferably 1-3 mismatches compared to target and/or having one or more PAM mismatches, such as distal PAM mismatches), preferably also considering variability within a population. CRISPR effector stability may be optimized by selecting CRISPR effector having appropriate half-life, such as preferably a short half-life while still capable of maintaining sufficient activity. In one example embodiment, this can be achieved by selecting an appropriate CRISPR effector orthologue having a specific half-life or by specific CRISPR effector mutations or modifications which affect half-life or stability, such as inclusion (e.g. fusion) of stabilizing or destabilizing domains or sequences. CRISPR effector mRNA stability may be optimized by increasing or decreasing CRISPR effector mRNA stability. In one example embodiment, this can be achieved by increasing or decreasing CRISPR effector mRNA stability through mRNA modification. gRNA stability may be optimized by increasing or decreasing gRNA stability. In one example embodiment, this can be achieved by increasing or decreasing gRNA stability through RNA modification. CRISPR-Cas or CAST complex stability may be optimized by increasing or decreasing CRISPR effector stability and/or gRNA stability as above. CRISPR effector protein or mRNA immunogenicity or toxicity may be optimized by decreasing CRISPR effector protein or mRNA immunogenicity or toxicity. In one example embodiment, this can be achieved by mRNA or protein modifications. Similarly, in case of DNA based expression systems, DNA immunogenicity or toxicity may be decreased. gRNA immunogenicity or toxicity may be optimized by decreasing gRNA immunogenicity or toxicity. In one example embodiment, this can be achieved by gRNA modifications. Similarly, in case of DNA based expression systems, DNA immunogenicity or toxicity may be decreased. CRISPR-Cas or CAST complex immunogenicity or toxicity may be optimized by decreasing CRISPR effector immunogenicity or toxicity and/or gRNA immunogenicity or toxicity as above, or by selecting the least immunogenic or toxic CRISPR effector/gRNA combination. Similarly, in case of DNA based expression systems, DNA immunogenicity or toxicity may be decreased. CRISPR effector protein or mRNA dose or titer may be optimized by selecting dosage or titer to minimize toxicity and/or maximize specificity and/or efficacy. gRNA dose or titer may be optimized by selecting dosage or titer to minimize toxicity and/or maximize specificity and/or efficacy. CRISPR-Cas or CAST complex dose or titer may be optimized by selecting dosage or titer to minimize toxicity and/or maximize specificity and/or efficacy. CRISPR effector protein size may be optimized by selecting minimal protein size to increase efficiency of delivery, in particular for virus mediated delivery. CRISPR effector, gRNA, or CRISPR-Cas or CAST complex expression level may be optimized by limiting (or extending) the duration of expression and/or limiting (or increasing) expression level. This may be achieved for instance by using self-inactivating compositions, systems, such as including a self-targeting (e.g. CRISPR effector targeting) gRNA, by using viral vectors having limited expression duration, by using appropriate promoters for low (or high) expression levels, by combining different delivery methods for individual CRISP-Cas or CAST system components, such as virus mediated delivery of CRISPR-effector encoding nucleic acid combined with non-virus mediated delivery of gRNA, or virus mediated delivery of gRNA combined with non-virus mediated delivery of CRISPR effector protein or mRNA. CRISPR effector, gRNA, or CRISPR-Cas or CAST complex spatiotemporal expression may be optimized by appropriate choice of conditional and/or inducible expression systems, including controllable CRISPR effector activity optionally a destabilized CRISPR effector and/or a split CRISPR effector, and/or cell- or tissue-specific expression systems.

[0727] In an aspect, the invention relates to a method as described herein, comprising selection of one or more (therapeutic) target, selecting the functionality of the composition and/or system, selecting CRISPR-Cas system mode of delivery, selecting CRISPR-Cas or CAST system delivery vehicle or expression system, and optimization of selected parameters or variables associated with the CRISPR-Cas system and/or its functionality, optionally wherein the parameters or variables are one or more selected from CRISPR effector specificity, gRNA specificity, CRISPR-Cas or CAST complex specificity, PAM restrictiveness, PAM type (natural or modified), PAM nucleotide content, PAM length, CRISPR effector activity, gRNA activity, CRISPR-Cas c or CAST complex activity, target cleavage efficiency, target site selection, target sequence length, ability of effector protein to access regions of high chromatin accessibility, degree of uniform enzyme activity across genomic targets, epigenetic tolerance, mismatch/budge tolerance, CRISPR effector stability, CRISPR effector mRNA stability, gRNA stability, CRISPR-Cas or CAST complex stability, CRISPR effector protein or mRNA immunogenicity or toxicity, gRNA immunogenicity or toxicity, CRISPR-Cas complex immunogenicity or toxicity, CRISPR effector protein or mRNA dose or titer, gRNA dose or titer, CRISPR-Cas or CAST complex dose or titer, CRISPR effector protein size, CRISPR effector expression level, gRNA or CAST expression level, CRISPR-Cas complex expression level, CRISPR effector spatiotemporal expression, gRNA spatiotemporal expression, CRISPR-Cas or CAST complex spatiotemporal expression.

[0728] In an aspect, the invention relates to a method as described herein, comprising selecting one or more (therapeutic) target, selecting one or more the functionality of the composition and/or system, selecting one or more CRISPR-Cas or CAST system mode of delivery, selecting one or more delivery vehicle or expression system, and optimization of selected parameters or variables associated with the CRISPR-Cas or CAST system and/or its functionality, wherein specificity, efficacy, and/or safety are optimized, and optionally wherein optimization of specificity comprises optimizing one or more parameters or variables selected from CRISPR effector specificity, gRNA specificity, CRISPR-Cas or CAST complex specificity, PAM restrictiveness, PAM type (natural or modified), PAM nucleotide content, PAM length, wherein optimization of efficacy comprises optimizing one or more parameters or variables selected from CRISPR effector activity, gRNA activity, CRISPR-Cas or CAST complex activity, target cleavage efficiency, target site selection, target sequence length, CRISPR effector protein size, ability of effector protein to access regions of high chromatin accessibility, degree of uniform enzyme activity across genomic targets, epigenetic tolerance, mismatch/budge tolerance, and wherein optimization of safety comprises optimizing one or more parameters or variables selected from CRISPR effector stability, CRISPR effector mRNA stability, gRNA stability, CRISPR-Cas or CAST complex stability, CRISPR effector protein or mRNA immunogenicity or toxicity, gRNA immunogenicity or toxicity, CRISPR-Cas or CAST complex immunogenicity or toxicity, CRISPR effector protein or mRNA dose or titer, gRNA dose or titer, CRISPR-Cas or CAST complex dose or titer, CRISPR effector expression level, gRNA expression level, CRISPR-Cas or CAST complex expression level, CRISPR effector spatiotemporal expression, gRNA spatiotemporal expression, CRISPR-Cas or CAST complex spatiotemporal expression.

[0729] In an aspect, the invention relates to a method as described herein, comprising optionally selecting one or more (therapeutic) target, optionally selecting one or more the functionality of the composition and/or system, optionally selecting one or more mode of delivery, optionally selecting one or more delivery vehicle or expression system, and optimization of selected parameters or variables associated with the system and/or its functionality, wherein specificity, efficacy, and/or safety are optimized, and optionally wherein optimization of specificity comprises optimizing one or more parameters or variables selected from CRISPR effector specificity, gRNA specificity, CRISPR-Cas or CAST complex specificity, PAM restrictiveness, PAM type (natural or modified), PAM nucleotide content, PAM length, wherein optimization of efficacy comprises optimizing one or more parameters or variables selected from CRISPR effector activity, gRNA activity, CRISPR-Cas or CAST complex activity, target cleavage efficiency, target site selection, target sequence length, CRISPR effector protein size, ability of effector protein to access regions of high chromatin accessibility, degree of uniform enzyme activity across genomic targets, epigenetic tolerance, mismatch/budge tolerance, and wherein optimization of safety comprises optimizing one or more parameters or variables selected from CRISPR effector stability, CRISPR effector mRNA stability, gRNA stability, CRISPR-Cas complex stability, CRISPR effector protein or mRNA immunogenicity or toxicity, gRNA immunogenicity or toxicity, CRISPR-Cas complex immunogenicity or toxicity, CRISPR effector protein or mRNA dose or titer, gRNA dose or titer, CRISPR-Cas or CAST complex dose or titer, CRISPR effector expression level, gRNA expression level, CRISPR-Cas or CAST complex expression level, CRISPR effector spatiotemporal expression, gRNA spatiotemporal expression, CRISPR-Cas complex spatiotemporal expression.

[0730] In an aspect, the invention relates to a method as described herein, comprising optimization of selected parameters or variables associated with the system and/or its functionality, wherein specificity, efficacy, and/or safety are optimized, and optionally wherein optimization of specificity comprises optimizing one or more parameters or variables selected from CRISPR effector specificity, gRNA specificity, CRISPR-Cas or CAST complex specificity, PAM restrictiveness, PAM type (natural or modified), PAM nucleotide content, PAM length, wherein optimization of efficacy comprises optimizing one or more parameters or variables selected from CRISPR effector activity, gRNA activity, CRISPR-Cas or CAST complex activity, target cleavage efficiency, target site selection, target sequence length, CRISPR effector protein size, ability of effector protein to access regions of high chromatin accessibility, degree of uniform enzyme activity across genomic targets, epigenetic tolerance, mismatch/budge tolerance, and wherein optimization of safety comprises optimizing one or more parameters or variables selected from CRISPR effector stability, CRISPR effector mRNA stability, gRNA stability, CRISPR-Cas complex stability, CRISPR effector protein or mRNA immunogenicity or toxicity, gRNA immunogenicity or toxicity, CRISPR-Cas or CAST complex immunogenicity or toxicity, CRISPR effector protein or mRNA dose or titer, gRNA dose or titer, CRISPR-Cas or CAST complex dose or titer, CRISPR effector expression level, gRNA expression level, CRISPR-Cas or CAST complex expression level, CRISPR effector spatiotemporal expression, gRNA spatiotemporal expression, CRISPR-Cas or CAST complex spatiotemporal expression.

[0731] It will be understood that the parameters or variables to be optimized as well as the nature of optimization may depend on the (therapeutic) target, the functionality of the composition and/or system, the system mode of delivery, and/or the CRISPR-Cas system delivery vehicle or expression system.

[0732] In an aspect, the invention relates to a method as described herein, comprising optimization of gRNA specificity at the population level. Preferably, said optimization of gRNA specificity comprises minimizing gRNA target site sequence variation across a population and/or minimizing gRNA off-target incidence across a population.

[0733] In one example embodiment, optimization can result in selection of a CRISPR-Cas effector that is naturally occurring or is modified. In one example embodiment, optimization can result in selection of a CRISPR-Cas effector that has nuclease, nickase, deaminase, transposase, and/or has one or more effector functionalities deactivated or eliminated. In one example embodiment, optimizing a PAM specificity can include selecting a CRISPR-Cas effector with a modified PAM specificity. In one example embodiment, optimizing can include selecting a CRISPR-Cas effector having a minimal size. In certain embodiments, optimizing effector protein stability comprises selecting an effector protein having a short half-life while maintaining sufficient activity, such as by selecting an appropriate CRISPR effector orthologue having a specific half-life or stability. In certain embodiments, optimizing immunogenicity or toxicity comprises minimizing effector protein immunogenicity or toxicity by protein modifications. In certain embodiments, optimizing functional specific comprises selecting a protein effector with reduced tolerance of mismatches and/or bulges between the guide RNA and one or more target loci.

[0734] In certain embodiments, optimizing efficacy comprises optimizing overall efficiency, epigenetic tolerance, or both. In certain embodiments, maximizing overall efficiency comprises selecting an effector protein with uniform enzyme activity across target loci with varying chromatin complexity, selecting an effector protein with enzyme activity limited to areas of open chromatin accessibility. In certain embodiments, chromatin accessibility is measured using one or more of ATAC-seq, or a DNA-proximity ligation assay. In certain embodiments, optimizing epigenetic tolerance comprises optimizing methylation tolerance, epigenetic mark competition, or both. In certain embodiments, optimizing methylation tolerance comprises selecting an effector protein that modify methylated DNA. In certain embodiments, optimizing epigenetic tolerance comprises selecting an effector protein unable to modify silenced regions of a chromosome, selecting an effector protein able to modify silenced regions of a chromosome, or selecting target loci not enriched for epigenetic markers

[0735] In certain embodiments, selecting an optimized guide RNA comprises optimizing gRNA stability, gRNA immunogenicity, or both, or other gRNA associated parameters or variables as described herein elsewhere.

[0736] In certain embodiments, optimizing gRNA stability and/or gRNA immunogenicity comprises RNA modification, or other gRNA associated parameters or variables as described herein elsewhere. In certain embodiments, the modification comprises removing 1-3 nucleotides form the 3′ end of a target complementarity region of the gRNA. In certain embodiments, modification comprises an extended gRNA and/or trans RNA/DNA element that create stable structures in the gRNA that compete with gRNA base pairing at a target of off-target loci, or extended complimentary nucleotides between the gRNA and target sequence, or both.

[0737] In certain embodiments, the mode of delivery comprises delivering gRNA and/or CRISPR effector protein, delivering gRNA and/or CRISPR effector mRNA, or delivery gRNA and/or CRISPR effector as a DNA based expression system. In certain embodiments, the mode of delivery further comprises selecting a delivery vehicle and/or expression systems from the group consisting of liposomes, lipid particles, nanoparticles, biolistics, or viral-based expression/delivery systems. In certain embodiments, expression is spatiotemporal expression is optimized by choice of conditional and/or inducible expression systems, including controllable CRISPR effector activity optionally a destabilized CRISPR effector and/or a split CRISPR effector, and/or cell- or tissue-specific expression system.

[0738] The methods as described herein may further involve selection of the mode of delivery. In certain embodiments, gRNA (and tracr, if and where needed, optionally provided as a sgRNA) and/or CRISPR effector protein are or are to be delivered. In certain embodiments, gRNA (and tracr, if and where needed, optionally provided as a sgRNA) and/or CRISPR effector mRNA are or are to be delivered. In certain embodiments, gRNA (and tracr, if and where needed, optionally provided as a sgRNA) and/or CRISPR effector provided in a DNA-based expression system are or are to be delivered. In certain embodiments, delivery of the individual system components comprises a combination of the above modes of delivery. In certain embodiments, delivery comprises delivering gRNA and/or CRISPR effector protein, delivering gRNA and/or CRISPR effector mRNA, or delivering gRNA and/or CRISPR effector as a DNA based expression system.

[0739] The methods as described herein may further involve selection of the CRISPR-Cas system delivery vehicle and/or expression system. Delivery vehicles and expression systems are described herein elsewhere. By means of example, delivery vehicles of nucleic acids and/or proteins include nanoparticles, liposomes, etc. Delivery vehicles for DNA, such as DNA-based expression systems include for instance biolistics, viral based vector systems (e.g. adenoviral, AAV, lentiviral), etc. the skilled person will understand that selection of the mode of delivery, as well as delivery vehicle or expression system may depend on for instance the cell or tissues to be targeted. In certain embodiments, the delivery vehicle and/or expression system for delivering the compositions, systems, or components thereof comprises liposomes, lipid particles, nanoparticles, biolistics, or viral-based expression/delivery systems.

### Considerations for Therapeutic Applications

[0740] A consideration in genome editing therapy is the choice of sequence-specific nuclease, such as a variant of a Cas (e.g. Cas9 and/or Cas12) nuclease. Each nuclease variant may possess its own unique set of strengths and weaknesses, many of which must be balanced in the context of treatment to maximize therapeutic benefit. For a specific editing therapy to be efficacious, a sufficiently high level of modification must be achieved in target cell populations to reverse disease symptoms. This therapeutic modification ‘threshold’ is determined by the fitness of edited cells following treatment and the amount of gene product necessary to reverse symptoms. With regard to fitness, editing creates three potential outcomes for treated cells relative to their unedited counterparts: increased, neutral, or decreased fitness. In the case of increased fitness, corrected cells may be able and expand relative to their diseased counterparts to mediate therapy. In this case, where edited cells possess a selective advantage, even low numbers of edited cells can be amplified through expansion, providing a therapeutic benefit to the patient. Where the edited cells possess no change in fitness, an increase the therapeutic modification threshold can be warranted. As such, significantly greater levels of editing may be needed to treat diseases, where editing creates a neutral fitness advantage, relative to diseases where editing creates increased fitness for target cells. If editing imposes a fitness disadvantage, as would be the case for restoring function to a tumor suppressor gene in cancer cells, modified cells would be outcompeted by their diseased counterparts, causing the benefit of treatment to be low relative to editing rates. This may be overcome with supplemental therapies to increase the potency and/or fitness of the edited cells relative to the diseased counterparts.

[0741] In addition to cell fitness, the amount of gene product necessary to treat disease can also influence the minimal level of therapeutic genome editing that can treat or prevent a disease or a symptom thereof. In cases where a small change in the gene product levels can result in significant changes in clinical outcome, the minimal level of therapeutic genome editing is less relative to cases where a larger change in the gene product levels are needed to gain a clinically relevant response. In one example embodiment, the minimal level of therapeutic genome editing can range from 0.1 to 1%, 1-5%, 5-10%, 10-15%, 15-20%, 20-25%, 25-30%, 30-35%, 35-40%, 40-45%. 45-50%, or 50-55%. Thus, where a small change in gene product levels can influence clinical outcomes and diseases where there is a fitness advantage for edited cells, are ideal targets for genome editing therapy, as the therapeutic modification threshold is low enough to permit a high chance of success.

[0742] The activity of NHEJ and HDR DSB repair can vary by cell type and cell state. NHEJ is not highly regulated by the cell cycle and is efficient across cell types, allowing for high levels of gene disruption in accessible target cell populations. In contrast, HDR acts primarily during S/G2 phase, and is therefore restricted to cells that are actively dividing, limiting treatments that require precise genome modifications to mitotic cells [Ciccia, A. & Elledge, S. J. Molecular cell 40, 179-204 (2010); Chapman, J. R., et al. Molecular cell 47, 497-510 (2012)].

[0743] The efficiency of correction via HDR may be controlled by the epigenetic state or sequence of the targeted locus, or the specific repair template configuration (single vs. double stranded, long vs. short homology arms) used [Hacein-Bey-Abina, S., et al. The New England journal of medicine 346, 1185-1193 (2002); Gaspar, H. B., et al. Lancet 364, 2181-2187 (2004); Beumer, K. J., et al. G3 (2013)]. The relative activity of NHEJ and HDR machineries in target cells may also affect gene correction efficiency, as these pathways may compete to resolve DSBs [Beumer, K. J., et al. Proceedings of the National Academy of Sciences of the United States of America 105, 19821-19826 (2008)]. HDR also imposes a delivery challenge not seen with NHEJ strategies, as it uses the concurrent delivery of nucleases and repair templates. Thus, these differences can be kept in mind when designing, optimizing, and/or selecting a CRISPR-Cas based therapeutic as described in greater detail elsewhere herein.

[0744] CRISPR-Cas- or CAST-based polynucleotide modification application can include combinations of proteins, small RNA molecules, and/or repair templates, and can make, in one example embodiment, delivery of these multiple parts substantially more challenging than, for example, traditional small molecule therapeutics. Two main strategies for delivery of compositions, systems, and components thereof have been developed: ex vivo and in vivo. In one example embodiment of ex vivo treatments, diseased cells are removed from a subject, edited and then transplanted back into the patient. In other embodiments, cells from a healthy allogeneic donor are collected, modified using a CRISPR-Cas system or component thereof, to impart various functionalities and/or reduce immunogenicity, and administered to an allogeneic recipient in need of treatment. Ex vivo editing has the advantage of allowing the target cell population to be well defined and the specific dosage of therapeutic molecules delivered to cells to be specified. The latter consideration may be particularly important when off-target modifications are a concern, as titrating the amount of nuclease may decrease such mutations (Hsu et al., 2013). Another advantage of ex vivo approaches is the typically high editing rates that can be achieved, due to the development of efficient delivery systems for proteins and nucleic acids into cells in culture for research and gene therapy applications.

[0745] In vivo polynucleotide modification via compositions, systems, and/or components thereof involves direct delivery of the compositions, systems, and/or components thereof to cell types in their native tissues. In vivo polynucleotide modification via compositions, systems, and/or components thereof allows diseases in which the affected cell population is not amenable to ex vivo manipulation to be treated. Furthermore, delivering compositions, systems, and/or components thereof to cells in situ allows for the treatment of multiple tissue and cell types.

[0746] In one example embodiment, such as those where viral vector systems are used to generate viral particles to deliver the CRISPR-Cas system and/or component thereof to a cell, the total cargo size of the CRISPR-Cas system and/or component thereof should be considered as vector systems can have limits on the size of a polynucleotide that can be expressed therefrom and/or packaged into cargo inside of a viral particle. In one example embodiment, the tropism of a vector system, such as a viral vector system, should be considered as it can impact the cell type to which the CRISPR-Cas system or component thereof can be efficiently and/or effectively delivered.

[0747] When delivering a system or component thereof via a viral-based system, it can be important to consider the amount of viral particles that will be needed to achieve a therapeutic effect so as to account for the potential immune response that can be elicited by the viral particles when delivered to a subject or cell(s). When delivering a system or component thereof via a viral based system, it can be important to consider mechanisms of controlling the distribution and/or dosage of the system in vivo. Generally, to reduce the potential for off-target effects, it is optimal but not necessarily required, that the amount of the system be as close to the minimum or least effective dose. In practice this can be challenging to do.

[0748] In one example embodiment, it can be important considered the immunogenicity of the system or component thereof. In embodiments, where the immunogenicity of the system or component thereof is of concern, the immunogenicity system or component thereof can be reduced. By way of example only, the immunogenicity of the system or component thereof can be reduced using the approach set out in Tangri et al. Accordingly, directed evolution or rational design may be used to reduce the immunogenicity of the CAST components in the host species (human or other species).

### Additional Embodiments of Applications

[0749] In particular embodiments, the methods described herein may involve targeting one or more polynucleotide targets of interest. The polynucleotide targets of interest may be targets which are relevant to a specific disease or the treatment thereof, relevant for the generation of a given trait of interest or relevant for the production of a molecule of interest. When referring to the targeting of a “polynucleotide target” this may include targeting one or more of a coding regions, an intron, a promoter and any other 5′ or 3′ regulatory regions such as termination regions, ribosome binding sites, enhancers, silencers etc. The gene may encode any protein or RNA of interest. Accordingly, the target may be a coding region which can be transcribed into mRNA, tRNA or rRNA, but also recognition sites for proteins involved in replication, transcription and regulation thereof.

[0750] In particular embodiments, the methods described herein may involve targeting one or more genes of interest, wherein at least one gene of interest encodes a long noncoding RNA (lncRNA). While lncRNAs have been found to be critical for cellular functioning. As the lncRNAs that are essential have been found to differ for each cell type (C. P. Fulco et al., 2016, Science, doi:10.1126/science.aag2445; N. E. Sanjana et al., 2016, Science, doi:10.1126/science.aaf8325), the methods provided herein may involve the step of determining the lncRNA that is relevant for cellular function for the cell of interest.

[0751] In an exemplary method for modifying a target polynucleotide by integrating an exogenous polynucleotide template, a double stranded break is introduced into the genome sequence by the CRISPR complex, the break is repaired via homologous recombination an exogenous polynucleotide template such that the template is integrated into the genome. The presence of a double-stranded break facilitates integration of the template.

[0752] In other embodiments, this invention provides a method of modifying expression of a polynucleotide in a eukaryotic cell. The method comprises increasing or decreasing expression of a target polynucleotide by using a CRISPR complex that binds to the polynucleotide.

[0753] In some methods, a target polynucleotide can be inactivated to effect the modification of the expression in a cell. For example, upon the binding of a CRISPR complex to a target sequence in a cell, the target polynucleotide is inactivated such that the sequence is not transcribed, the coded protein is not produced, or the sequence does not function as the wild-type sequence does. For example, a protein or microRNA coding sequence may be inactivated such that the protein is not produced.

[0754] In some methods, a control sequence can be inactivated such that it no longer functions as a control sequence. As used herein, “control sequence” refers to any nucleic acid sequence that effects the transcription, translation, or accessibility of a nucleic acid sequence. Examples of a control sequence include, a promoter, a transcription terminator, and an enhancer are control sequences. The inactivated target sequence may include a deletion mutation (i.e., deletion of one or more nucleotides), an insertion mutation (i.e., insertion of one or more nucleotides), or a nonsense mutation (i.e., substitution of a single nucleotide for another nucleotide such that a stop codon is introduced). In some methods, the inactivation of a target sequence results in “knockout” of the target sequence.

[0755] Also provided herein are methods of functional genomics which involve identifying cellular interactions by introducing multiple combinatorial perturbations and correlating observed genomic, genetic, proteomic, epigenetic and/or phenotypic effects with the perturbation detected in single cells, also referred to as “perturb-seq”. In one example embodiment, these methods combine single-cell RNA sequencing (RNA-seq) and clustered regularly interspaced short palindromic repeats (CRISPR)-based perturbations (Dixit et al. 2016, Cell 167, 1853-1866; Adamson et al. 2016, Cell 167, 1867-1882). Generally, these methods involve introducing a number of combinatorial perturbations to a plurality of cells in a population of cells, wherein each cell in the plurality of the cells receives at least 1 perturbation, detecting genomic, genetic, proteomic, epigenetic and/or phenotypic differences in single cells compared to one or more cells that did not receive any perturbation, and detecting the perturbation(s) in single cells; and determining measured differences relevant to the perturbations by applying a model accounting for co-variates to the measured differences, whereby intercellular and/or intracellular networks or circuits are inferred. More particularly, the single cell sequencing comprises cell barcodes, whereby the cell-of-origin of each RNA is recorded. More particularly, the single cell sequencing comprises unique molecular identifiers (UMI), whereby the capture rate of the measured signals, such as transcript copy number or probe binding events, in a single cell is determined.

[0756] These methods can be used for combinatorial probing of cellular circuits, for dissecting cellular circuitry, for delineating molecular pathways, and/or for identifying relevant targets for therapeutics development. More particularly, these methods may be used to identify groups of cells based on their molecular profiling. Similarities in gene-expression profiles between organic (e.g. disease) and induced (e.g. by small molecule) states may identify clinically-effective therapies.

[0757] Accordingly, in particular embodiments, therapeutic methods provided herein comprise, determining, for a population of cells isolated from a subject, optimal therapeutic target and/or therapeutic, using perturb-seq as described above.

[0758] In particular embodiments, pertub-seq methods as referred to herein elsewhere are used to determine, in an isolated cell or cell line, cellular circuits which may affect production of a molecule of interest.

[0759] The subject invention may be used as part of a research program wherein there is transmission of results or data. A computer system (or digital device) may be used to receive, transmit, display and/or store results, analyze the data and/or results, and/or produce a report of the results and/or data and/or analysis. A computer system may be understood as a logical apparatus that can read instructions from media (e.g. software) and/or network port (e.g. from the internet), which can optionally be connected to a server having fixed media. A computer system may comprise one or more of a CPU, disk drives, input devices such as keyboard and/or mouse, and a display (e.g. a monitor). Data communication, such as transmission of instructions or reports, can be achieved through a communication medium to a server at a local or a remote location. The communication medium can include any means of transmitting and/or receiving data. For example, the communication medium can be a network connection, a wireless connection, or an internet connection. Such a connection can provide for communication over the World Wide Web. It is envisioned that data relating to the present invention can be transmitted over such networks or connections (or any other suitable means for transmitting information, including but not limited to mailing a physical report, such as a print-out) for reception and/or for review by a receiver. The receiver can be but is not limited to an individual, or electronic system (e.g. one or more computers, and/or one or more servers). In one example embodiment, the computer system comprises one or more processors. Processors may be associated with one or more controllers, calculation units, and/or other units of a computer system, or implanted in firmware as desired. If implemented in software, the routines may be stored in any computer readable memory such as in RAM, ROM, flash memory, a magnetic disk, a laser disk, or other suitable storage medium. Likewise, this software may be delivered to a computing device via any known delivery method including, for example, over a communication channel such as a telephone line, the internet, a wireless connection, etc., or via a transportable medium, such as a computer readable disk, flash drive, etc. The various steps may be implemented as various blocks, operations, tools, modules and techniques which, in turn, may be implemented in hardware, firmware, software, or any combination of hardware, firmware, and/or software. When implemented in hardware, some or all of the blocks, operations, techniques, etc. may be implemented in, for example, a custom integrated circuit (IC), an application specific integrated circuit (ASIC), a field programmable logic array (FPGA), a programmable logic array (PLA), etc. A client-server, relational database architecture can be used in embodiments of the invention. A client-server architecture is a network architecture in which each computer or process on the network is either a client or a server. Server computers are typically powerful computers dedicated to managing disk drives (file servers), printers (print servers), or network traffic (network servers). Client computers include PCs (personal computers) or workstations on which users run applications, as well as example output devices as disclosed herein. Client computers rely on server computers for resources, such as files, devices, and even processing power. In one example embodiment of the invention, the server computer handles all of the database functionality. The client computer can have software that handles all the front-end data management and can also receive data input from users. A machine readable medium comprising computer-executable code may take many forms, including but not limited to, a tangible storage medium, a carrier wave medium or physical transmission medium. Non-volatile storage media include, for example, optical or magnetic disks, such as any of the storage devices in any computer(s) or the like, such as may be used to implement the databases, etc. shown in the drawings. Volatile storage media include dynamic memory, such as main memory of such a computer platform. Tangible transmission media include coaxial cables; copper wire and fiber optics, including the wires that comprise a bus within a computer system. Carrier-wave transmission media may take the form of electric or electromagnetic signals, or acoustic or light waves such as those generated during radio frequency (RF) and infrared (IR) data communications. Common forms of computer-readable media therefore include for example: a floppy disk, a flexible disk, hard disk, magnetic tape, any other magnetic medium, a CD-ROM, DVD or DVD-ROM, any other optical medium, punch cards paper tape, any other physical storage medium with patterns of holes, a RAM, a ROM, a PROM and EPROM, a FLASH-EPROM, any other memory chip or cartridge, a carrier wave transporting data or instructions, cables or links transporting such a carrier wave, or any other medium from which a computer may read programming code and/or data. Many of these forms of computer readable media may be involved in carrying one or more sequences of one or more instructions to a processor for execution. Accordingly, the invention comprehends performing any method herein-discussed and storing and/or transmitting data and/or results therefrom and/or analysis thereof, as well as products from performing any method herein-discussed, including intermediates.

[0760] In one example embodiment, the systems or complexes can target nucleic acid molecules, e.g., CRISPR-Type V effector complexes can target and cleave or nick or simply sit upon a target DNA molecule (depending if the Type V effector has mutations that render it a nickase or “dead”). Such systems or complexes are amenable for achieving tissue-specific and temporally controlled targeted deletion of candidate disease genes. Examples include but are not limited to genes involved in cholesterol and fatty acid metabolism, amyloid diseases, dominant negative diseases, latent viral infections, among other disorders. Accordingly, target sequences for such systems or complexes can be in candidate disease genes, e.g.:

TABLE 10
Diseases and Targets

| Disease | GENE | SPACER | PAM | Mechanism | References |
|---|---|---|---|---|---|
| Hypercholes- | HMG-CR | GCCAAA | CGG | Knockout | Fluvastatin: a review |
| terolemia | | TTGGACG | | | of its pharmacology |
| | | ACCCTCG | | | and use in the |
| | | (SEQ ID | | | management of |
| | | NO: 502) | | | hypercholesterolaemia. |
| | | | | | (Plosker GL et al. |
| | | | | | Drugs 1996, 51(3): |
| | | | | | 433-459) |
| Hypercholes- | SQLE | CGAGGAG | TGG | Knockout | Potential role of |
| terolemia | | ACCCCCG | | | nonstatin cholesterol |
| | | TTTCGG | | | lowering agents |
| | | (SEQ ID | | | (Trapani et al. IUBMB |
| | | NO: 503) | | | Life, Volume 63, |
| | | | | | Issue 11, pages |
| | | | | | 964-971, Nov. 2011) |
| Hyper- | DGAT1 | CCCGCCG | AGG | Knockout | DGAT1 inhibitors as |
| lipidemia | | CCGCCGT | | | anti-obesity and |
| | | GGCTCG | | | anti-diabetic agents. |
| | | (SEQ ID | | | (Birch AM et al. |
| | | NO: 504) | | | Current Opinion in |
| | | | | | Drug Discovery & |
| | | | | | Development |
| | | | | | [2010, 13(4): 489-496) |
| Leukemia | BCR-ABL | TGAGCTC | AGG | Knockout | Killing of leukemic |
| | | TACGAGA | | | cells with a BCR/ABL |
| | | TCCACA | | | fusion gene by RNA |
| | | (SEQ ID | | | interference (RNAi). |
| | | NO: 505) | | | (Fuchs et al.Oncogene |
| | | | | | 2002, 21(37): |
| | | | | | 5716-5724) |

### Kits

[0761] In another aspect, the disclosure includes kits and kits of parts. The terms “kit of parts” and “kit” as used throughout this specification refer to a product containing components necessary for carrying out the specified methods (e.g., methods for detecting, quantifying or isolating immune cells as taught herein), packed so as to allow their transport and storage. Materials suitable for packing the components comprised in a kit include crystal, plastic (e.g., polyethylene, polypropylene, polycarbonate), bottles, flasks, vials, ampules, paper, envelopes, or other types of containers, carriers or supports. Where a kit comprises a plurality of components, at least a subset of the components (e.g., two or more of the plurality of components) or all of the components may be physically separated, e.g., comprised in or on separate containers, carriers or supports. The components comprised in a kit may be sufficient or may not be sufficient for carrying out the specified methods, such that external reagents or substances may not be necessary or may be necessary for performing the methods, respectively. Typically, kits are employed in conjunction with standard laboratory equipment, such as liquid handling equipment, environment (e.g., temperature) controlling equipment, analytical instruments, etc. In addition to the recited binding agents(s) as taught herein, such as for example, antibodies, hybridization probes, amplification and/or sequencing primers, optionally provided on arrays or microarrays, the present kits may also include some or all of solvents, buffers (such as for example but without limitation histidine-buffers, citrate-buffers, succinate-buffers, acetate-buffers, phosphate-buffers, formate buffers, benzoate buffers, TRIS (Tris(hydroxymethyl)-aminomethan) buffers or maleate buffers, or mixtures thereof), enzymes (such as for example but without limitation thermostable DNA polymerase), detectable labels, detection reagents, and control formulations (positive and/or negative), useful in the specified methods. Typically, the kits may also include instructions for use thereof, such as on a printed insert or on a computer readable medium. The terms may be used interchangeably with the term “article of manufacture”, which broadly encompasses any man-made tangible structural product, when used in the present context.

### EXAMPLES

### Example 1

[0762] This example shows an exemplary composition capable of inserting a donor sequence into a target polynucleotide. The composition comprised a dCas9 with one or more of TnsB, TnsC, or TniQ (FIGS. 1A and 1B). In this example, dCas9 could replace Cas12 in the CAST compositions and systems described in the present disclosure. Tethering TniQ to dCas9 removed the requirement for Cas12k, and tethering TnsC removed the requirement for both Cas12k and TniQ (FIG. 1C).

[0763] Insertion was observed in fusion of dCas9 to TniQ (FIGS. 2A-2D) or to TnsC (FIGS. 3A-3D.) with either N- or C-terminal designs. In each case, Applicants observed different insertion positions and direction of the donor relative to the Cas9 protospacer.

### Example 2— Dead Cas (DCAS)+Single Strand Transposases

[0764] To harness single-strand transposases for precise DNA insertions.

[0765] The binding of Cas9 and its guide RNA to target DNA results in the formation of an R-loop¹, exposing a short stretch of single-stranded DNA.

[0766] To facilitate precise DNA insertions, Applicants investigated the HUH family of bacterial transposases which transpose using single-strand DNA intermediates. These enzymes can break and rejoin DNA autonomously and can insert circular donor molecules into single-stranded DNA independent of host repair machinery. Targeting these enzymes through fusion to Cas9 allowed for DNA integration in the exposed DNA strand, and the use of the Cas9^{D10A} nickase mutant resulted in a cut only on the opposite strand and facilitate fill-in synthesis (FIG. 5).

[0767] First, Applicants harnessed the transposase TnpA from the Helicobacter pylori insertion sequence IS608 which inserted a single-strand donor into positions 5′ of a TTAC sequence and which was reprogrammed to target alternative sites. Applicants created fusions of TnpA_{Is608} to the N- and C-termini of Cas9^{D10A} for expression in HEK293 cells and for protein production in Escherichia coli. Applicants performed in vitro reactions with both mammalian lysate and purified protein using DNA substrates to optimize protein design including orientation and peptide linker length.

[0768] Applicants next identified related orthologs to TnpA_{Is608} and test for increased activity and specificity of DNA insertion. Highly active transposases may be under negative selection in nature as they might compromise host viability. Applicants therefore performed protein BLAST searches to identify a consensus TnpA sequence and tested mutations that revert TnpA_{Is608} to the consensus sequence for increased insertion efficiency.

[0769] Once optimized in vitro, Applicants introduced TnpA-Cas9^{D10A} constructs into mammalian cells using lipid-based DNA transfection and nucleofection of purified protein-DNA complexes to test for genomic integration and long-term stability at a variety of sites and genomic contexts. While the on-target insertion frequency could easily be measured by next-generation sequencing, Applicants also performed genome fragmentation with Tn5 to identify all insertion sites in an unbiased manner. This characterization was important to determine the specificity of integration. To reduce potential off-target integrations, these tools were further be combined with Cas9 variants that increase target specificity⁸ or with new CRISPR proteins being characterized in the Zhang laboratory.

[0770] The successful development of this technology provided a powerful method to integrate DNA into the genome of mammalian cells. This process was independent of host DSB repair factors and should only require fill-in DNA synthesis from the host, a process that occurred during nucleotide excision repair even in non-dividing cells. The ability to precisely integrate transgenes may be used to supply tumor suppressor genes to cells without the random integration of existing method, for example viral integration or double-strand transposase methods like piggyBac. The integration of DNA at splice acceptor sites using TnpA-dCas9 fusions could also allow for repair of endogenous gene mutations by providing replacement exons.

[0771] The methods here were used to for precise inserting DNA independent of cellular repair pathways. The results are shown in FIGS. 4A-15.

[0772] FIG. 4A shows a schematic of a134 bp double-strand DNA substrate for in vitro transposases reactions. The transposase TnpA from Helicobacter pylori IS608 inserts single-stranded DNA 5′ to TTAC sites. FIG. 4B shows a schematic of constructs for expression in mammalian cells. TnpA from IS608 functions as a dimer and constructs were made fusing a monomer of TnpA to Cas9-D10A (TnpA-Cas9), a tandem dimer of TnpA to Cas9-D10A (TnpAₓ₂-Cas9), or free TnpA alone. XTEN₁₆ and XTEN₃₂ are protein linkers of 16 and 32 amino acids respectively. FIG. 4C shows insertion of foreign DNA with mammalian cell lysates containing TnpA. In vitro reactions with the 134 bp substrate in panel a, synthesized sgRNA, and lysates from mammalian cells expressing the indicated constructs. The provided donor included in all reactions is a 200 bp circular ssDNA molecule containing the left and right hairpins of IS608 and 90 bp foreign internal DNA. PCR E1 amplifies the complete substrate, while the insertion-specific PCRs, E2 and E3, contain one flanking primer and one primer specific to the donor sequence. The observed products are consistent with donor insertion and match the predicted sizes of 183 bp (E2), and 170 bp (E3). The inability to detect a 334 bp band in the total reaction, or in PCR E1 suggests that the overall rate of insertion is low. PCRs E2 and E3 indicate donor insertion when TnpA is present in any lysate which is independent of sgRNA. FIG. 4D shows NGS sequencing of E2 products indicating the insertion site of donor DNA. Non-specific integration by TnpA occurs at all possible integration sites in the array indicated by peaks 4 bp apart. Incubation with TnpAₓ₂-Cas9-D10A lysate led to the targeted integration of single-strand DNA 5′ to positions 15 and 19 bp from the PAM in a manner that was dependent on presence and target site of guide RNA.

[0773] FIG. 5A shows a schematic of a 280 bp double-strand DNA substrate for in vitro transposases reactions cloned into pUC19. The substrate contains two array of TTACx6 TnpA insertion sites, one which is targeted by Cas9 sgRNAs. Plasmid substrates were treated with T5 exonuclease to remove contaminating single-strand DNA. FIG. 5B shows insertion of foreign DNA with mammalian cell lysates containing TnpA. In vitro reactions with the 280 bp substrate in panel a, synthesized sgRNA, and lysates from mammalian cells expressing the indicated constructs. The donor DNA is a 160 bp circular ssDNA molecule containing the left and right hairpins of IS608 and 90 bp foreign DNA. PCR E1 amplifies the complete substrate, while the insertion-specific PCRs, E2 and E3, contain one flanking primer and one primer specific to the donor sequence. A 250 bp PCR product is detectable after incubation with TnpA_{Is608 x2}-Cas9_{D10A}, but not TnpA alone, and is dependent on the presence of donor and sgRNA. FIG. 5C shows purification of recombinant TnpA_{Is608 x2}-Cas9_{D10A}from E. coli which matches. Coomassiestained SDS-PAGE showing two dilutions of purified protein. FIG. 5D shows comparison of in vitro DNA insertions using mammalian cell lysates versus purified protein. In vitro reactions with the 280 bp substrate in panel a, synthesized sgRNA, and lysates from mammalian cells expressing the indicated constructs or purified protein from panel c. The donor DNA was a 160 bp circular ssDNA molecule containing the left and right hairpins of IS608 and 90 bp foreign DNA. PCR E1 amplified the complete substrate, while the insertion-specific PCRs, E2 and E3, contained one flanking primer and one primer specific to the donor sequence. E2 products of 250 bp were weakly visible upon addition of TnpA_{Is608 x2}-Cas9_{D10A}lysate and protein while PCR E3 detected more robust insertion products. The darker band at 152 bp was consistent with directed insertions to the Cas9-targeted TTAC array in contrast to the 240 bp band, predicted to be the size for non-targeted insertions at the second TTAC array. The 152 bp E3 insertion-specific PCR products were dependent on donor DNA and sgRNA.

[0774] FIG. 6 shows a schematic demonstrating an exemplary method. Cas9 was used to expose a single-stranded DNA substrate. A HUH transposase was tethered to insert single-stranded DNA. The opposing strand was nicked and allowed to fill-in DNA synthesis.

[0775] FIG. 7 shows a schematic of mammalian expression constructs with TnpA from Helicobacter pylori IS608 to D10A nickase Cas9. XTEN₁₆ and XTEN₃₂ are two different polypeptide linkers. Schematic of Substrate 1, a double-stranded DNA substrate (complementary strand not shown) with an array of twelve TTAC insertion sites and targeted by two Cas9 sgRNAs. Cell lysate was from transfected HEK293 cells. The step used a 134 bp dsDNA donor (annealed oligos) and a 200 bp circular ssDNA donor

[0776] FIG. 8 shows in vitro insertion reactions. Substrate 1 was incubated with the indicated mammalian cell lysates, a 200 bp circular single-stranded DNA donor, and sgRNAs. PCRs E2 and E3 detect insertion products by spanning the insertion junction with one donor-specific primer.

[0777] FIG. 9 shows NGS of the insertion sites from the highlighted E2 reactions in slide 7. In the absence of guide, insertions were detected at all possible positions in the array. Addition of sgRNA1 or sgRNA2 in the reaction biased insertion events to two more prominent sites in the substrate.

[0778] FIG. 10 shows the prominent insertions sites correspond to positions 16 and 20 from the PAM of the respective sgRNAs. DNA insertions 3′ to TTAC were at positions 16 and 20 in the sgRNA.

[0779] FIG. 11 shows a schematic and expression of new fusions of TnpA-Cas9 fusions from a variety of bacterial species. GGS₃₂ and XTEN₃₂ are polypeptide linkers. ISHp608 from Helicobacter pylori, ISCbt1 from Clostridium botulinum, ISNsp2 from Nostoc sp., ISBce3 from Bacillus cereus, IS200G from Yersinia pestis, ISMma22 from Methanosarcina mazei, IS1004 from V. cholera. Experiments with Substrate 1 revealed insertion products with TnpA alone which may have resulted from single-stranded DNA contamination of the substrate. A second plasmid substrate (Substrate 2) was constructed with two arrays of six TTAC insertion sites. Single-stranded DNA was removed by T5 exonuclease digestion. This step focused on tandem dimer fusion of TnpA to Cas9. The ssDNA was removed from substrates.

[0780] FIG. 12 shows in vitro insertion reactions. Substrate 2 was incubated with the indicated mammalian cell lysates, a 160 bp circular single-stranded DNA donor, and sgRNA1. PCR E2 detects insertion events which are predicted to be 247 bp in size. The insertion product was dependent on Cas9, donor, and sgRNA.

[0781] FIG. 13 shows SDS-PAGE of TnpA-Cas9 purified protein (left, two dilutions shown). In vitro reactions with mammalian cell lysate and purified protein both reveal insertion events dependent on donor and sgRNA. +^{lin} donor denotes a linear donor.

[0782] FIG. 14 shows NGS of the insertion sites from the highlighted reactions in slide 12. Low levels of insertion were detected throughout the array in the absence of guide. Addition of sgRNA2 resulted in targeted insertions within the guide sequence, most prominently at position 16 from the PAM. Cas9-targeted insertions 3′ to TTAC were at position 16 in the sgRNA

[0783] FIG. 15 shows a plasmid substrate (Substrate 3) with insertions sites recognized by different TnpA orthologs. In vitro reactions with mammalian lysates, a 160 bp circular single-stranded DNA donor, and sgRNAs. TnpA from IS608 inserts after TTAC sequence and targeting other regions of the substrate does not result in detectable insertions. A correct TnpA insertion site was needed within the sgRNA.

[0784] The Y1 HUH transposases were used for targeted insertions. Insertion events in dsDNA appeared dependent on Cas9, sgRNA and the presence of a TnpA insertion site.

[0785] FIG. 16 shows the results using TnsC and TniQ fusions on E. coli targeting activity. TnsC fused to dAsCpf1 (Cas12a) indicated insertion reads predominantly about 45 bp, 50 bp, 55 bp, 60 bp, 65 bp upstream from the PAM (left panel). TniQ, 3×tandem repeats) fused to dCas9 indicated insertions reads predominantly about 55 bp, 60 bp, 65 bp, 70 bp, 75 bp upstream from the PAM (right panel). RNP complexes with and without sgRNA are shown below each graph.

[0786] FIG. 17 shows E. coli targeting activities of two different transposase-CRISPR effector fusions. Improved insertion activities are shown for a TniQ-Bh-Cas12b fusion (10×improvement in insertion frequency over Q-dCas9) and a TniQ fusion to Cas9 containing three tandem TniQ copies (5×improvement in insertion frequency over Q-dCas9) as described in FIG. 16.

[0787] Various modifications and variations of the described methods, pharmaceutical compositions, and kits of the invention will be apparent to those skilled in the art without departing from the scope and spirit of the invention. Although the invention has been described in connection with specific embodiments, it will be understood that it is capable of further modifications and that the invention as claimed should not be unduly limited to such specific embodiments. Indeed, various modifications of the described modes for carrying out the invention that are obvious to those skilled in the art are intended to be within the scope of the invention. This application is intended to cover any variations, uses, or adaptations of the invention following, in general, the principles of the invention and including such departures from the present disclosure come within known customary practice within the art to which the invention pertains and may be applied to the essential features herein before set forth.

The application's sequence listing, which the Patent Office published only in electronic form, follows.

SEQUENCE LISTING (505 sequences)

SEQ ID NO: 1 - DNA, 134 bp, Artificial Sequence
  Synthetic
  misc_feature (1)..(30): N is any nucleotide
  misc_feature (105)..(134): N is any nucleotide
nnnnnnnnnnnnnnnnnnnnnnnnnnnnnngggagtcttcttacttacttacttacttacttacttacttacttacttacttacttacggggggcaccaaaactnnnnnnnnnnnnnnnnnnnnnnnnnnnnnn

SEQ ID NO: 2 - DNA, 60 bp, Artificial Sequence
  Synthetic
gagtcttcttacttacttacttacttacttacttacttacttacttacttacttacgggg

SEQ ID NO: 3 - DNA, 56 bp, Artificial Sequence
  Synthetic
ctcaatgaccgggactaaagtacttacttacttacttacttacggggggaggcgaa

SEQ ID NO: 4 - protein, 353 aa, Artificial Sequence
  Synthetic
MSTIPIGSYKFSQKLHPLSLLAQLTSRRATGCLRIFTGTVSWSIYLEDGKLTYASYSEKLFDRLDNHLQQLSQQIPALNSATAMQMRLMFEPKGENQPISDADYQAICWLANQAHITSSQAGMLIENLAKEVLELFLTLKEGSYEFSAENSLNQLPKFCSLDLRLLVEHCQKQLRSQQNSQLPLPAPGKTQVEKATRLPQSQMQLGQPLPHQSNFDSQDTNNNKMQGQTASKQLYRVACIDDSQTVLNSIKNFLDENTFSVVLINDPVKALMQILRSKPDLILLDVEMPNLDGYELCSLLRRHSAFKNTPIIMVTGRTGFIDRAKAKMVRASGYLTKPFTQPELLKMVFKHIS

SEQ ID NO: 5 - protein, 584 aa, Artificial Sequence
  Synthetic
MNSQQNPDLAVHPLAIPMEGLLGESATTLEKNVIATQLSEEAQVKLEVIQSLLEPCDRTTYGQKLREAAEKLNVSLRTVQRLVKNWEQDGLVGLTQTSRADKGKHRIGEFWENFITKTYKEGNKGSKRMTPKQVALRVEAKARELKDSKPPNYKTVLRVLAPILEKQQKAKSIRSPGWRGTTLSVKTREGKDLSVDYSNHVWQCDHTRVDVLLVDQHGEILSRPWLTTVIDTYSRCIMGINLGFDAPSSGVVALALRHAILPKRYGSEYKLHCEWGTYGKPEHFYTDGGKDFRSNHLSQIGAQLGFVCHLRDRPSEGGVVERPFKTLNDQLFSTLPGYTGSNVQERPEDAEKDARLTLRELEQLLVRYIVDRYNQSIDARMGDQTRFERWEAGLPTVPVPIPERDLDICLMKQSRRTVQRGGCLQFQNLMYRGEYLAGYAGETVNLRFDPRDITTILVYRQENNQEVFLTRAHAQGLETEQLALDEAEAASRRLRTAGKTISNQSLLQEVVDRDALVATKKSRKERQKLEQTVLRSAAVDESNRESLPSQIVEPDEVESTETVHSQYEDIEVWDYEQLREEYGF

SEQ ID NO: 6 - protein, 276 aa, Artificial Sequence
  Synthetic
MTEAQAIAKQLGGVKPDDEWLQAEIARLKGKSIVPLQQVKTLHDWLDGKRKARKSCRVVGESRTGKTVACDAYRYRHKPQQEAGRPPTVPVVYIRPHQKCGPKDLFKKITEYLKYRVTKGTVSDFRDRTIEVLKGCGVEMLIIDEADRLKPETFADVRDIAEDLGIAVVLVGTDRLDAVIKRDEQVLERFRAHLRFGKLSGEDFKNTVEMWEQMVLKLPVSSNLKSKEMLRILTSATEGYIGRLDEILREAAIRSLSRGLKKIDKAVLQEVAKEYK

SEQ ID NO: 7 - protein, 167 aa, Artificial Sequence
  Synthetic
MIEAPDVKPWLFLIKPYEGESLSHFLGRFRRANHLSASGLGTLAGIGAIVARWERFHFNPRPSQQELEAIASVVEVDAQRLAQMLPPAGVGMQHEPIRLCGACYAESPCHRIEWQYKSVWKCDRHQLKILAKCPNCQAPFKMPALWEDGCCHRCRMPFAEMAKLQKV

SEQ ID NO: 8 - protein, 468 aa, Artificial Sequence
  Synthetic
MDYFSTGKIAYPKLTLYAFHLKHSLSQKPKIPVKNANDLWLKCQQLGKQLGIPKLETLPELIEKANNKKTSITGEILPERFLKFTAIQHQPNLHLSGEANPLEIHDTYALDLTLRYPYSEVKLADLRGLNLDDCLLSKNIKASLGQTLVFFAQPVGKIHDEQAFADACVKALLSEEISQKLNIYCQHQGQLLGSPIFEYNNDADFPEKQCHLLIWLNTHDITTELENKGEYYYPLIDLLLCRSKIIYARSEAIWCYEQAKSAYSDLEKYKQEFKEQKNNSIDSKFNNLNQWLQEIPEISFNYVDYLKDLELHKTTIQTNSKNYRLYLEKLNKIGIGSDNLEFLSNFLELAEDTLVEQINTNLAYLTPGQNLFDQMIGTIRGIVELEQAKRDRSLERTIQVLGIAFGGGAIVSGVVTQHIDKPFAPQINFKYPVHPLVSSLLWSVLATAIFGIVAWWVTKPKPKRNKQK

SEQ ID NO: 9 - protein, 112 aa, Artificial Sequence
  Synthetic
MSDYEITVNTFIHLLNTQSYLFSAEDRITLMKLINNQPDDIKSLSDTISDWCAKHPEVDKALGEFEKIVVRGPGDKQANTNIPKYELDKKNILNEIQQSSSSAKETKKTTST

SEQ ID NO: 10 - protein, 1239 aa, Artificial Sequence
  Synthetic
MLGERAENLEQAIACHQKAVKIYTLDAFPYEWASTQNNLGAAYRDRILGEQAENLELVIACFQNALKIYTFEAFPDDWANTQDNLGTAYANRIKGEQAENLELAIAAYSAALEVRTRSNFPEDWAMTQNNLGGAYSYRILGNRAENIELAIAACSAALEVTTRSAFPEYWARTQYNLGIAYSQRILGEKTENIETAIAAYSAALEVTTRSAFPIDWARTQNNLGGAYSQRILGEKAENIETAIAAYSVALEVYTRSAFPEYWAGTQYNLGIAYRQRILGNRDENIELAIAAFSAALEVRTRSAFPEDWATTQNDLGIAYGERILGEKAENIELAIAAFSAALEVRTRSAFPVDWADKQNNLGIAYTYRILGEKAENIELAIAAYSAALEVRTRSAFPENWATTQNNLGGAYSQRILGEKAENIELAIAAYSAALEVRTRSAFPEDWAITQNNLGGAYTYRILGEKAENIETAIAAYSAALEVTTRSAFPEDWATTQNNLGIAYGERILGEKAENIELAIAAYSVALEVTTRSAFPVDWASTQHNLGNAYLDRILGEKAENIESAIAAYSSALEVRTRSAFPEKWAGTQNSLGNAYLDRILGEKAENIELAIAAFSAALEVYTRSAFPENWAMTQTNLGGAYRERIFGEKAENIESAITAYTAALEVRTRNAFPQNHATTLLNLGRLYQDEKQLDSAYNTFLQAIETAETLRGGTVSGEEAKRKQAEEWNQLYQRMVAVCLELGKDTEAIEYIERSKTRNLVELILNRDLKTIFPPEVVTQLEQLRDEIATGQYQIQNGKAENPRLLAQHLQELRQQRNELQNRYLPVGYGFKFESFQATLDERTAIIEWYILNDKILAFIVTKTGELTVWQSQPEDIKALVNWGNQYLQNYDDQKDQWLNSLGEELKELASILHIDEILTQIPKHSYKLILIPHFFLHLFPLHALPINQNSENSSCLLDLFAGGVSYAPSCQLLQQVQQRQRPDFQSLFAIQNPTEDLNYTNLEVESILSYFPSHQVLSKKQATKAALSQAATQLKQANYLHFSCHGSFNLNYPQNSFLLLADAYISPIPDDANPERYLKVSDTEAIDLSKCLTLGNLFEQTFDFSQTRLVVLSACETGLIDFNNTSDEYIGLPSGFLYAGSSSVVSSLWTVNDLSTSFLMIKFIQILKNATDMSIPLGMNQAQRWLRDATKEELQEWVKKLALDSTKKGKIRRQINNMTGEQPFNSPFHWAAFTAVGK

SEQ ID NO: 11 - protein, 67 aa, Artificial Sequence
  Synthetic
MTYLEKLSPWCIVRLKPNMQNQIVARFRRRSDAEAHLQVLRRLIPGVSFTLIFNVGLEQQDLTAVNE

SEQ ID NO: 12 - protein, 100 aa, Artificial Sequence
  Synthetic
MNPHPLKQREQDLMQLYSYCQLGMTPKQFYSKWQVNYEEMAQICDRSLSTVRRWFARGKNYRRPMPVDLRHLALMNFLLEHFEDIPEEVLQKLCFPEKSE

SEQ ID NO: 13 - protein, 185 aa, Artificial Sequence
  Synthetic
MLKPVSYKTDQHRAYQQALDDFGITELLAKLNNYSDVDFDSAWIQLQQQEIESLAAILISQLTYSLNGKLIAAYLNLIRHSNQDIVPSLINLKCPDASIELPANFSDVAKTPRFLYGDRLRWLSTESNTDWGIVIGRFYSNACDRCCWSWCYLIWLSKNSPSAAWTSADIAWEEDLEPISEETEL

SEQ ID NO: 14 - protein, 54 aa, Artificial Sequence
  Synthetic
MGKVTVTLYMEEEDKEALQFLADAEERSLSQMAVLIVKRAIKQAQNDGKIPPKS

SEQ ID NO: 15 - protein, 109 aa, Artificial Sequence
  Synthetic
MKIEIQGRDAVKATEELLAIEGLEGSYQTIEEVEREGTLATIATIVGIVSGTLTIAESIHKWKEKNQKSLHDPTGARVEKVLIVTDDNRRLLLKDATVEQIKEILENYK

SEQ ID NO: 16 - protein, 964 aa, Artificial Sequence
  Synthetic
MKILHLYLKLVGDRYAQLRLFWDNPNNCQSRQLPLAEITGLIKKVETDYYTRLPEDYAKTGQALYNWLDGSDRIFQSAIDQHKREVIVLAIAATEKLAHLPWEILHDSTDFLVNRRPFPIIPIRWVKDDDSKQLTPEDQPANRALNVLFMATSPLGIEPELDFEAEEAQVLSATKRQPLSLIVEESGCLKELGYLVDDYDKSYFDVIHLTGHTTFRDGEPRFITETELGQAEYSSAEDIATELQFQLPKLIFLSGCNTGYSSDAGAVPSMAEALLKQGATAVIGWGQRVLDTDAIATAAALYQELSAGKTLTEAIAIAYQVLLKNQARDWHLLRLYVAETLPGALVKRGRKPVPRASVAQEFLDPEKKLRVATRETFVGRRRQLQNCLRVLKPYSEKIGILIHGMGGLGKSTIAARLCDRLSESEKIIGWRQIDESSLVSKLADKLRNAELRTALREGKEELKYRLRDVFAELNQSGEKPFLLVFDDFEWNLEHRQGRYILKTQVAEILKSLVWAIKENNADHRIIITCRYDFESDLDESFYKQPLESFRKSDLQKKLSRLKAFNSEEISLNLIERAKILADGNPRVLEWLNDEVLLGEDAETKLTQLKANPTEWQGRIIWEELYEQLDQDIEQILSRCLVFEIPVPMIALSAVCESTSDYKKQLSRAIELGLIEVSSEAEESNRLYRVSRIIPHIIPNIRLPEAPEVYCLYQKAYEKLHQMWGDKNNRSEEKWQEIFRLKFANKDNPERFRQGFSQMLAVQDNSEADKAFESELRKCTNELEADKLCEALENYLQQEQWKQADKETAWTFYQVMVKENYADWHELLKNFPCETLQEINRLWLENSNNKFGISIQSKIYQSLTGKDNSWNKFCDLVGWRKRGKSQTYNEIVDELTDIKRVVNDTFADVHVPSLPALIYTRLGDGWTTSMGWTVGDERPGFGGFGFLVVACGIENLFSLAESCKD

SEQ ID NO: 17 - protein, 582 aa, Artificial Sequence
  Synthetic
MKIESFFVNFELLTDAPNAVAKLREIILQLAVRGKLVSQKPNDEPALSSLNRAKIENEFFQQTEIFARDELDSFCPNNRSLATIPHRWEWVSLVEVVDKGKNSIKRGPFGSSIRKEFFVPDGYKVYEQKNAIYDDFQLGYYFINEKKFQELKDFELKPNDIIISCSGTIGRIAVAPESIRQGIINQALLKITLNTKLLSNNYFKILFPAFFMNTSVLTELKGTAIKNIVGVQALKQLLFPLPPIAEQKRIVEKCDRLLSICDEIEKRQQQRQESILRMNESAIAQLLSSQNPDEFRQHWQRIRNNFDLFYSVPETIPKLRQAILQLAVQGKLVRQEFDESALRYLIERITEERLALCPNEKDKQRILSEFGKIIEESAQGKTEEFEIPAICICDFITKGTTPSNSELLPEGEIPYLKVYNIVDNKIDFFYKPTYISRTVHTTKLKRSLVCPGDVLMNIVGPPLGKIAIVPDDFPEWNINQALAVFRPVDSVYNRFMYYALSSYATLEKVLNETKGTAGQDNLSLEQCRSLRIPLYTIETQKRIVEKCDRLMSLCDTLEAKLKQGRDSSEKLMEVAAKQVLTA

SEQ ID NO: 18 - protein, 480 aa, Artificial Sequence
  Synthetic
MSISTTIKTIQDIMRKDAGVDGDAQRINQLVWMIFLKVFDAREEEYELLEDNYQSPIPEGLRWRNWAADSEGITGDGLLDFVDNALFKTLKELRTTATDARGQMIGKVFEDAYNYMKNGTLIRQVINKLNEVDFNKKDQKKQFSEIYEKILKDLQSAGNAGEYYTPRAVTKFIVDRIKPQLGEIVFDPACGTGGFLTAAIDYIRQNFQSADVPETLQRTIRGTEKKPLPFNLCVTNLILHGIDVPSAEHDNTLARPLRDYSPHERVDVIITNPPFGGMEEDGIEDNFPATFRTRETADLFLVLIAHLLKEGGRGAIVLPDGTLFGEGVKTRIKEKLLQDCNLHTIVRLPNGVFNPYTSIKTNLLFFTKGEPTERIWYYEHPYPAGYKSYSKTKPIRFEEFAPEQEWWDNREKNEFAWQVSIADLKANNYNIDIKNPHKVDVEHADLDEMLAEHQKLMAELGEVRSKLKFELIEALEIDED

SEQ ID NO: 19 - protein, 777 aa, Artificial Sequence
  Synthetic
MPEAIDKKSLSERDICTKYITPALTNRAWDINTQIREEVTLTKGRVIVRGKLASRGEQKRADYVLYHKPGVPLAVIEAKDNNHGVSAGMQQAIATGELIDVPFIFSSNGDAFMMCDRTITEGQREREIPLEQFPTPQELWQKYCDWKGIDSEIQPIVSQDYYPSSDKKQPRYYQQIAINRTIEAIAKGENRILLVMATGTGKTFTAFQIIWRLWKSGAKKRILFLADRNILVDQTRVNDFKPFGSRMTKIQKRQIDKSYEIYLCLYQAVTGNEEAKNIYRQFSPDFFDLIIIDECHRGSANEDSAWREILEYFRNATQIGLTATPRETEEASNINYFGESLFTYSLKQGIEDGFLAPYKVIRIDLDKDLSGWKPKPGQRDKYGKPIPDQVYNQRDFDRTLVLEKRTELVARIISDYLKSSDRFAKTIIFCETTDHAERMRVALVNENADLVAGNSRYIMRITGDDAQGKAELDNFIDPESKYPTIVTTSELLTTGVDAKTCKLIVLDQRILSMTKFKQIIGRGTRIDEDYGKMFFTIMDFKKATELFADPDFDGDPVQIYQPKPVDPIVPPDTGDDEVVIDDGEISRKQTRDRYVIADEEVSIAFIREQYYGKDGKLITESIKDYTRKTVSQEYASLDAFLKKWHSTEQKQAIIRELQELGVPLEALEKEIGRDFDPLDLICHVVFDQPPLTRKERANNVRKRNYFSNYGEQARTVLNALLDKYADEGIEDIESLDVLKVQPISDLGTPLEIISIFGGKQAYLQALSVLKSEIYRVS

SEQ ID NO: 20 - protein, 150 aa, Artificial Sequence
  Synthetic
MEGKFYTSTEAAQITNCSRRQLQYWRDKGVVVPTVNTTGKGRNVYYSISDLLVLTVMHYLLSVGLSFEVSRQTLVILRQKEPWLFEEFVPKEKMKRLMLLTTCSLEQPLTLAEFDKEAALEALCQGQTVIPFWCDRIHQQLRDNLKSFSS

SEQ ID NO: 21 - protein, 400 aa, Artificial Sequence
  Synthetic
MLVFEAKLEGTKQQYEQLDEAIRTARFIRNSCIRYWMDNPYIGRYELSAYCVVLQREFPFANKLNSMARQASAERAWSAIARFYDNCKKKAAKKGFPRFKKHQTHGSVEYKTCGWKLSEDRRTITFTDGFKAGSFKMWGTRDLHFYQLKQIKRVRAVRRADGYYVQFCLDVERVEKREPTGKTIGLDVGLAHFYTDSDGKTVENPRHLRKSEKALNRLGRRLSRTTKGSKNRAKSRNRLSRKHLKVSRQRKDFAVKLARCVIQSNDLVAYEDLQVRNMVKNRKLSKSISDAAWSAFRNWLEYFGKVFGVATVAVPPHYTSQNCSKCGEVIKKSLSQRTHKCHQCGLVLDTDWNAARNILELALRTVGHTGTLNASGDISLCMSEEIPSSKLSRGKRKPKE

SEQ ID NO: 22 - DNA, 1755 bp, Artificial Sequence
  Synthetic
atgaacagtcagcaaaatcctgatttagctgttcatcccttggcaattcctatggaaggcttactaggagaaagtgctacaactcttgagaagaatgtaattgccacacaactctcagaggaagcccaagtaaagctagaggtaatccaaagtttactggaaccctgcgatcgcacaacttatgggcaaaagttgcgggaagcagcagagaaactaaatgtatcgttgcgaacggtacaaaggttggtgaaaaactgggaacaagatggcttagtcggactcactcaaacaagtagggctgataaaggaaaacaccgcattggtgagttttgggaaaacttcattaccaaaacctacaaggagggtaacaagggaagtaaacgtatgacccctaaacaagttgctctcagagtcgaggctaaagcccgtgaattaaaagactctaagccgcccaattacaaaaccgtgttacgggtattagcacccattttggaaaagcaacaaaaagccaagagtatccgcagtcctggttggagaggaactacgctttcggttaaaacccgtgaaggaaaagatttatcggttgattacagtaaccatgtttggcaatgtgaccatacccgcgtggatgtgttgctggtagatcaacatggtgaaattttaagtcgtccctggctaacaacagtaattgatacttactctcgttgcattatgggtatcaacttgggctttgatgcacccagttctggggtagtagcattagcgttacgccatgcaattctaccaaagcgttacggttccgagtacaaactgcattgtgagtggggaacctatggaaaaccagaacatttttatactgatggcggtaaagactttcgctctaaccacttgagtcagattggggcgcaattgggatttgtctgtcatttacgcgatcgcccttctgaaggtggagtagtagaacgtcccttcaaaacattaaatgaccaactattttcaacgcttcctgggtacaccggatctaatgtgcaggaacgcccagaagatgcagagaaggacgcaagacttactttgcgagaactagaacagttacttgtgcgttacatcgtagatcgttacaaccaaagtattgatgcgcggatgggcgaccaaacgcgctttgagcgttgggaagcaggattgcctacagtgccagtaccaataccagaacgagatttggatatttgtttaatgaagcagtcacggcgcactgtgcaaagaggtggttgtttgcagtttcagaatttaatgtatcggggggaatatttggcaggttatgccggagaaactgtcaacttaaggtttgaccccagagacattacaacaattttggtttatcgccaggaaaacaatcaggaagtatttctgactcgcgctcacgctcaaggtttggagacagagcaactggcattagatgaggctgaggcagcaagtcgcagactccgtaccgcagggaaaactatcagtaaccaatcattattgcaagaagttgttgaccgcgatgctcttgtcgctaccaagaaaagccgtaaggagcgtcaaaaattggaacagactgttttgcgatctgctgctgttgatgaaagtaatagagaatccttgccttctcaaatagttgaaccagatgaagtggaatctacagaaacggttcactctcaatacgaagacattgaggtgtgggactatgaacaacttcgtgaagaatatgggttttaa

SEQ ID NO: 23 - DNA, 827 bp, Artificial Sequence
  Synthetic
atgacagaagctcaggcgatcgccaagcagttgggtggggtaaaaccggatgatgagtggttacaagctgaaattgctcgtctcaagggtaagagcattgtgcctttacagcaggtaaaaactctccatgattggttagatggcaagcgcaaggcaagaaaatcttgccgagtagttggggaatcgagaactggcaagacagttgcttgtgatgcctacagatacaggcacaaacctcagcaggaagctggacgacctccaactgtgcctgtcgtttatattcgacctcaccaaaaatgtggccccaaggatttgtttaaaaagattactgagtacctcaagtatcgggtaacaaaagggactgtatctgattttcgagataggacgatagaagtactcaagggttgtggcgtagagatgctaattattgatgaagctgaccgtctcaagcctgaaacttttgctgatgtgcgagatattgccgaagatttaggaattgctgtggtactggtaggaacagaccgtttggatgcggtaattaagcgggatgagcaggttctcgaacgctttcgggcgcatcttcgctttggtaaattgtcgggagaggattttaagaacaccgtagaaatgtgggaacaaatggttttgaaactgccagtatcttctaatctaaagagcaaggagatgctacggattctcacgtcagcaactgaaggctacattggtcgccttgatgagattcttagggaagctgcaattcgttccttatcaagaggattgaagaagattgacaaggctgttttacaggaagtagctaaggagtacaa

SEQ ID NO: 24 - DNA, 504 bp, Artificial Sequence
  Synthetic
atgatagaagcaccagatgttaaaccttggctattcttgattaaaccctatgaaggggaaagcctgagccactttcttggcaggttcagacgtgccaaccatttatccgcaagtggattgggtactttggcaggaattggtgctatagtggcacgttgggaaagatttcattttaatcctcgccctagtcagcaagaattggaagcgatcgcatctgtagtagaagtggcagctcaaaggttagcccagatgttaccgcctgctggagtgggaatgcagcatgagccaattcgcttgtgtggggcttgttatgccgagtcgccttgtcaccgaattgaatggcagtacaagtcggtgtggaagtgcgatcgccatcaactcaagattttagcaaagtgtccaaactgtcaagcaccttttaaaatgcctgcgctgtgggaggatgggtgctgtcacagatgtaggatgccgtttgcagaaatggcaaagctacagaaggtttga

SEQ ID NO: 25 - DNA, 1866 bp, Artificial Sequence
  Synthetic
atggcagacgaagaatttgaatttactgaaggaacgacgcaagttccagatgctattttgcttgacaagagtaattttgtggtagatccatcccaaattattctggcaacgtcggatagacataaactgacatttaatctaatccagtggcttgctgaatctcccaaccgcactattaagtctcagagaaaacaggcagttgcaaatacccttgatgtttctactcgccaggtggaacgtcttctcaagcaatacgatgaagacaagttaagagagacagcaggaatagaacgagccgataagggaaaatatcgagttagcgaatattggcaaaacttcatcacaacaatctatgaaaagagtctgaaagaaaaacatccaatatcaccagcatccatagttcgtgaagtgaagcgacacgcaattgtggatcttgaacttaagctaggagaatatcctcatcaagccactgtttatagaattttagatcctttaatcgagcaacagaaacggaaaacaagagttagaaatccgggttcgggatcttggatgacagtagtaacacgagatggagagttacttagggctgactttagtaaccaaattattcagtgtgaccatactaaattggatgttcgcatagttgataatcatggcaatttactgtctgatcgtccttggctaactactattgtggatactttttcaagctgtgttgttggttttcgcttatggattaaacaacccggttctacagaggtggctttagctttaagacacgctattttacctaaaaactaccctgaagattatcaacttaataagtcttgggatgtatgtggacacccctatcaatatttttttactgatggtggtaaagattttcgctcaaaacatctcaaagctattggtaagaaattaggatttcagtgtgaattacgcgatcgcccaccggaaggtggtattgtggaacggattttcaaaactattaatactcaagttctcaaagagttacctggttatacaggggcaaatgttcaggaacgcccagaaaatgcagagaaagaagcctgtttaactattcaggatttggataagattctcgctagtttcttttgtgatatctataatcacgagccttatcctaaagagcctcgtgatacgagatttgaacgctggtttaagggtatgggaggaaaactacctgaacctttggatgagcgagaattagatatttgtttgatgaaagaagcccaacgagttgttcaagctcatggatctattcaatttgaaaacctgatttatcggggagaatttctcaaagcacataaaggtgaatatgtaacgctgagatatgatccagatcatatcctgagtttatatatctacagtggtgaaactgatgataatgcaggagaatttttgggttatgctcatgccgttaatatggatacccatgatttaagtatagaagaattaaaagccctgaataaagagagaagtaatgctcgtaaggagcattttaactatgatgctttattagcattgggtaaacgtaaagaacttgtagaggaacggaaagaggataaaaaggcaaaaagaaactcagaacaaaagcgtctccgttctgcatccaagaaaaattccaatgttattgaactacgcaaaagtaggacttccaaatctttgaagaaacaagaaaatcaggaagttttaccagagagaatttccagggaagaaatcaagcttgagaagatagaacagcaaccacaggaaaatctatcagcttcacctaacactcaagaagaagagagacataagttagttttctctaaccgtcaaaaaaatttgaacaagatttggtaa

SEQ ID NO: 26 - DNA, 852 bp, Artificial Sequence
  Synthetic
atggcgcaacctcaacttgcaactcaatctattgttgaagtcctagccccaaggttagacatcaaagctcaaattgctaaaactattgatattgaagagatttttagagcttgttttatcactactgatcgggcttcggaatgcttcagatggttagatgaattgcgtattctcaaacaatgtggtcgaatcattggaccaagaaatgtgggaaaaagcagagccgcgcttcactatcgagatgaggataaaaaacgagtttcctatgtaaaggcttggtctgcatcgagttctaagcggctattttcacaaatcctgaaggatattaatcatgctgcaccaacaggtaaacgacaggatttacgtccaagattagcgggtagtctggaactatttggattggaattggtgattatagataatgcggaaaatcttcaaaaagaagcactgctagacttgaaacaactttttgaagagtgtaatgttcctattgttttagctggaggtaaggagttagatgatcttttacacgattgtgatttgttgactaatttcccaacactctatgagtttgaacggttggaatatgatgatttcaaaaaaacattaactacaattgaattggatgttttatctcttccagaagcatctaatttagctgagggcaatatttttgagattttagcagttagtacagaagcacgaatgggaattttaatcaagatactaactaaggctgttttacattctctcaaaaatggatttcaccgagttgatgaaagtattttagaaaaaattgctagtcgttatggcacaaaatatattcctctcaaaaacagaaatagggattga

SEQ ID NO: 27 - DNA, 555 bp, Artificial Sequence
  Synthetic
atggcacaaaatatattcctctcaaaaacagaaatagggattgatgaagatgatgaaattcgcccaaagttaggctatgttgaaccttatgaggaggagagtattagtcattatctagggcgtttgcgacggtttaaggctaacagcctaccgtcaggatactctttgggaaaaattgctggactcggtgcaatgatttcacgttgggagaagctttatttcaatccttttcctactctacaagagttggaggctttgtcctctgtggtgggagttaatgcagatagattaatagaaatgctcccctctcagggaatgacgatgaagcctagaccaattaggttatgtggggcttgttatgcagaatctccttgtcatcggattgagtggcagtgtaaggatagaatgaaatgcgatcgccacaatttacgtttattaataaaatgtactaattgtgaaactcctttcccgattcccgcagattgggttaaaggtcaatgtcctcattgttccctgccttttgcaaagatggcgaaaaggcaaaggcgtgattag

SEQ ID NO: 28 - DNA, 1866 bp, Artificial Sequence
  Synthetic
atgctggacgaggaattcgagttcaccgaggaactgacacaggcccctgacgtgatcgtgctggacaagagccacttcgtggtggaccccagccagatcatcctgcagaccagcgacaagcacaagctgcggttcaacctgatcaagtggttcgccgagtctcccaacatcaccatcaagagccagcggaagcaggccgtggttgataccctgggagtgtccaccagacaggtggaaagactgctgaagcagtaccacaacggcgagctgtctgaaacagccggcgtgcagagaagcgataagggcaagctgagaatcagccagtattgggaagattacatcaagaccacctacgagaagtccctgaaggacaagcaccccatgctgcctgccgccgtcgttagagaagtgaagagacacgccatcgtggacctgggactgaagcctggcgattaccctcatcctgccaccatctaccggaatctggcccctctgatcgagcagcacacccggaagaaaaaagtgcggaatcctggcagcggcagctggctgacagtggtcacaagagatggccagctgctgaaggccgacttcagcaaccagatcattcagtgcgaccacaccgagctggacatccacatcgtggatagccacggcagcctgctgagcgatagaccttggctgaccacagtggtggatacctacagcagctgcatcctgggctttcacctgtggatcaagcagcctggcagcaccgaagttgccctggctctgagacatgccatcctgcctaagaactaccccgaggactacaagctgggcaaagtgtgggagatctacggccctccattccagtactttttcaccgatggcggcaaggacttcaacagcaagcacctgaaggccatcggcaagaaactgggcttccagtgcgagctgcggaacagacctcctcaaggcggcattgtggaacggctgttcaagaccatcaacacccaggtgctgaaagagctgcctggctacacaggcgccaacgtgcaagagaggcctaaaaacgccgagaaagaggcctgcctgaccatccaggatctggataagatcctggccagcttcttctgcgacatctacaaccacgagccgtatcctaaagagccccggaacaccagattcgagcggtggtttaaaggcatgggcggcaagctgcctgagcctctggatgagagagagctggatatctgcctgatgaaggaagctcagagagtcgttcaggcccacggctccatccagttcgagaacctgatctacagaggcgaggccctgaaagcctacaggggcgagtatgtgaccctgagatacgaccccgatcacgtgctgaccctgtacgtgtactcttgcgaggccgacgacaacgccgaggaatttctgggatatgcccacgccatcaacatggacacccacgacctgagcatcgaggaactcaagaccctgaacaaagagcggagcaaggccagaagcgaccactacaactacgatgccctgctggccctgggcaagagaaaagaactggtggaagagaggaagcaggacaagaaggccaagcggcagagcgagcagaagagactgagaaccgccagcaagaaaaactccaatgtgatcgagctgagaaagtccagagccagcagcagctccagcaaggacgaccggcaagagatcctgcctgagagagtgtctcgggacgagctgaagcccgagaaaacagagctgaagtacgaggaaaacctgctcgcccagaccgacacacagaagcaagagcggcacaaactggtggtgtccgaccggaagaagaacctgaagaacatctggtga

SEQ ID NO: 29 - DNA, 855 bp, Artificial Sequence
  Synthetic
atggccatctctcagctggccacacagcccttcgtggaagtgctgcctcctgagctggatagcaaggcccagatcgccaagaccatcgacatcgaggaactgttccggatcaacttcatcaccaccgaccggtccagcgagtgcttcagatggctggacgagctgcggatcctgaagcagtgcggcagaatcatcggccccagaaacgtgggcaagagcagagccgtgctgcactaccggaacgaggacaagaaacgggtgtcctacgtgaaggcttggagcgccagcagcagcaagagactgttcagccagattctgaaggacatcaaccacgccgcctccaccggcaagagacaggatcttagacctagactggccggcagcctggaactgtttggactggaactggtcatcgtggacaacgccgagaacctgcagaaagaggccctgctggacctcaagcagctgttcgaggaatgccacgtgccaatcgtgctcgtcggcggaaaagagctggacgacatcctggaagatttcgacctgctgaccaactttcccacactgtacgagttcgagcggctggaacacgacgacttcatcaagaccctgaaaaccatcgagctggacatcctgagcctgcctgaggcctctaagctgagcgagggcaacatctttgccatcctggccgagtctaccggcggcaagatcggcatcctggtcaagattctgaccaaggcagtgctgcacagcctgaagaaaggcttcggcaaggtggacgagtctatcctggaaaagatcgccagcagatacggcaccaaatacgtgcccatcgagaacaagaaccgcaacgactga

SEQ ID NO: 30 - DNA, 516 bp, Artificial Sequence
  Synthetic
atgatcgaggacgacgagatcagactgcggctgggctacgtggaacctcatcctggcgagagcatcagccactacctgggcagactgagaagattcaaggccaacagcctgcctagcggctatgccctgggaaagattgccggactgggcagcgttctgaccagatgggagaagctgtacttcaacccatttccgacacagcaagagctggaagccctggctcaagtgatccaggtggaagtggaaaagctgagagagatgctgcccaccaagggcgtgaccatgatgcccagacctatcagactgtgcgccgcctgttatgccgagtctccctaccacagaatcgagtggcagttcaaggacaagatgaagtgcgaccggcaccagctgagactgctgaccaagtgcaccaactgtcagaccccttttcctattcctgccgactgggagaagggcgagtgcagccactgctttctgagcttcgccaagatggtcaagtgccagaaacggcggtga

SEQ ID NO: 31 - DNA, 500 bp, Artificial Sequence
  Synthetic
tcgttctgctttccagagattggtggatgacttcccaacgacggtaagggagataactttgcgtcacccaggtgagtgcttgagagggggtagcatcgagaggtaatgcttggggttggtgtacattcgcaaattatatgtcgcaattcgcaaattagtgtcgcaattacttctaatagctgagatctttattgcgtaggacttacaagctatttatccataaaactgagtaatttgcctgtttcgcaaattagatgtcgcaaatcctattttcgcaaattaaatgtcgtttattaagatttgcctgtttcgcaaattagatgtcgcatttttgccacattagtggtactttagtacctaaagtgttaatcagtggttttcactccaatgttagacgaagaatttgagttcactgaggaattgacgcaagctccagatgttattgtgcttgacaagagtcattttgtggtagacccatcccaaattattctgcaaacatc

SEQ ID NO: 32 - DNA, 500 bp, Artificial Sequence
  Synthetic
gactctgtgccttttttggagtgttgttcatgcaaaatttgagaatcttgactagaactgaaactcttgctaagtaacgctttcaacgaaaataaagccatatagtacaaatttactaaaaatcaacaaaatcaacaccctagggtaagtctgtcaattagtccagtagcaagacattatgttagacgacattaatttgttaacgttagttggaactaattcgacgacattaattcgttaacagcgacattaatttgttaatcgacactaaatggagaaacaggacgacattaatttgcgaaaagttcctataattgaattgatgagacaaactattctaaacgacattaatttgcgaaaaacgacacaaatttgcgaattacgacatttaatttgcgaatgtacatttgcggttcatttaagtaggtagtctttgggcgggaaaggagtagaaaacactataaactacttaaaagaacataatttaaaccgcagcaact

SEQ ID NO: 33 - DNA, 1710 bp, Artificial Sequence
  Synthetic
atgcagctgcccatcgagttccctgagagcgaacaggtgtcccgcgaactggtggaacagaaccagatcgtgaccgagctgagcgacgaggccaagctgaagatcgaagtgatccagagcctgctggaaccctgcgacagagccacctacggcaacagactgagagatgccgccaccagactgggcaagagcgtcagaacagtgcagcggatggtcaagagctggcaagaggaaggcattgccggcctgagcaatggcgagagaacagacaagggcgagcaccggattgagcaagagtggcaggacttcatcatcaagacctaccaagagggcaacaagaacggcaagcggatgacccctgctcaggtggccatcagagtgaaagtgaaggcccagcaagaggggatcacaaagtaccccagccacatgaccgtgtaccgggtgctgaatcccctgatccagcgcaagaccgagaagcagaatgtgcggagcatcggctggcagggctctagactgagcctgaaaaccagagatggcaacagcctgtccgtggaatactccaatcaagtgtggcagtgcgaccacaccagagccgatatcctgctggtggatcagcacggcgagctgattggtagaccttggctgaccaccgtggtggacacctacagcagatgtatcgtgggcgtgaacctgggcttcgatgccccttcttctgacgtggtggcactggccctgagacacgccattctgcccaagacataccccgacagataccagctgaactgcgactggggcacatacggcaagcccgagcacttctttaccgacggcggcaaggacttcagaagcaaccatctgcagcagatcgccgtgcagattggcttcacctgtcacctgagaaacagaccctctgaaggcggcgtggtggaaagacctttcggcaccctgaacaccgagttcttcagcatcctgcctggctacaccggcagcaacgtgcagaaaagacccgaggaagccgaggaaagcgccagcctgacactgagagagctggaacagttcctcgtgcggtacatcaccgaccggtacaaccagggaatcgacgccagaatgggcgaccagaccaggtttcagagatgggaagctggcctgctggccaatcctagcgtgctgacagagcgcgagctggacatctgcctgatgaagcagacccgcagaaccgtgtacagagagggctacctgagattcgagaacctgatctaccggggcgagaatctggccggatatgccggcgaaacagtgaccctgagatacgagcccagagacatcaccaccgtgttcgtgtaccaccaagagcagggcaaagaggtgttcctgaccagagcacacgcccaggacctggaaaccgagacaatcagcctgtatgaggccaaggccagcagccggcggattagagatgtgggcaagaccatcagcaaccggtccatcctggaagaagtgcgcgacagggatctgttcgtgcagaagaaaacacggaaagagcggcagaaggccgagcaggccgaagtgaagattgatcaggtgccaagtcctcctcaggtgctgcatctggatgaggccagccagttcgagacagagatcgtggaaacccagtgcgtggaaatcagcgagatcgaggactacgagaagctgcgggacgacttcggatggtga

SEQ ID NO: 34 - DNA, 837 bp, Artificial Sequence
  Synthetic
atgatggccaacgaggcccagtctatcgcccagacacttggaagcctgcctctgacatctgagctgctgcaggccgagatccaccggctgacaaagaaaagcgtggtgtccctgagccaggtgcagagcctgcacaattggctggaaggcaagagacaggcccggcagtcttgtagagttgtgggcgagagcagaaccggcaagaccctggcctgtgatgcctacagactgcggcacaagcctacacagcaggccggaaagcctcctatcgtgcccgtggtgtatatccaggtgccacaagagtgcggcagcaaagagctgttccagatcatcatcgagcacctgaagtaccagatggtcaagggcaccgtggccgagattcgcgagagaaccatgagagtgctgaaaggctgcggcgtggaaatgctgatcatcgacgaagccgaccggctgaagcctaagacctttgccgatgtgcgggacatcttcgacaagctggaaatcagcgtggtgctcgtgggcaccgacagactggatgccgtgatcaagagggacgaacaggtgtacaaccggttccgggcctgccacagatttggaaaactggccggcgaggaattccggcggacaatcgagatttgggagaagcagatcctgaagctgcccgtggccagcaacctgacatctaaggccgctctgaagatcctgggcgagacaacagccggctacatcggactgctggacatggtgctgagagaggccgctatcagagccctgaagcagggcaagaccaagatcgacctggaaatcctgaaagaggtgtccaccgagtaccggtga

SEQ ID NO: 35 - DNA, 519 bp, Artificial Sequence
  Synthetic
atgatcgagcacagcgagatccagccatggttctttcacgtggaagccctggaaggcgagagcatctctcactttctgggcagattccggcaggccaacgagctgacaccttctggcgtgggcaagatctctggactcggcggagctattgccagatgggagaagttccggttcaacccctatcctacacagcagcagttcgagaagctgagcaccgccacaggcatcagcgttgagcagctgtggaagatgatgcctcctgaaggcgtgggaatgcagctggaacccatcagactgtgcgccagctgttatgccgagctgccttgtcaccagatccagtggcagttcaaggacacccagggatgcgaagtgcacggcctgagactgctgagcgagtgccctaattgcaaggcccggtttaagcctcctgccacttggagcgatagcaagtgccaccggtgcttcatgctgttcagcgagatgcggaaccggcagaagagacacagcttcagcagatga

SEQ ID NO: 36 - DNA, 500 bp, Artificial Sequence
  Synthetic
tttaggagcgttctcaaatttcacaactcaaatcggattgctctatgtgtagattgaaagaacagcaaattgctagcagaataaagtgttattcgacaattgttgtcgaataacactttaaatgtcgtcataacgaattgatgtcgttcagcctcaacaacttaaacttcctattaatattgactttcagctctttcagagcgatcgcgcccttgcaggacgattaacattatccatgtcgcttttcagagtagtaacaaattcagtgtcgtgttttacgatcaggggtttaacacaatcagcgtcatgattttgagatctcaatagatgacaaccagcaaaaggacaacctgacttcaaaatctacaatcagaccacaatcaaggtgcgatcgcggcaagattcccataaacctcagtttccgcatagtgtttagaaaaaatctgcttgaaaatctatttagctagaaacccagaaattctagctaaataagaattact

SEQ ID NO: 37 - DNA, 500 bp, Artificial Sequence
  Synthetic
ggtttgcggcaagggggcgattgaagagtaacttagtcttttgacaactttaataggcacaatctttcggttaacagtgggtggattgaaaggactgcctgactcggggttttaatttagaaatatttgcccctcgctataacgagcagagttagcattcgttttaactgggtagagtctgtactgtaaaatgttgaagtggataagaatttgaatgagcattcaactgcttgaagctctgatgacaagaatttgttaacgaatgatttcttacccctcgacgacaagaagctgttaaaacgacactaaattgttaacgacgacatcaatccgttaacgacgacaaataaagtgttattcgacaacaatcacacgaatttaaacaaaaaattgcctgactcttaaaagcccccagagtcaggcagtctacctgtaaggcacgcctttaaccggatacaccaaacaaacttagttgccccctagttgcttagcttttccga

SEQ ID NO: 38 - DNA, 1668 bp, Artificial Sequence
  Synthetic
atgaccatcgagaaccagatcagcgagagccaagagctgatctcccagctgagccctgaggaacaggccattgccgacgtgatcgaggatctggtgcagccctgcgacagaaagacatacggcgccaagctgaagaaggccgccgagacactgaacaagagcgtgcgaaccgtgcagcggtacatcaaagagtgggaagagaagggcctgctggccatcaagaagggcaacagaagcgaccagggcacctaccggatcgagaagagactgcaggacttcatcgtgaaaacctaccgcgagggcaacaagggcagcaagagaatcagccccaaacaggtgtacctgcggacaatggcccaggccaaagaatggtccatcgatcctccaagccacatgaccgtgtaccggattctgaaccccatcatcgaggaaaaagaaaacaagaaacgcgtgcggaaccccggctggcggggaacaaaactggctgtgtctaccagaagcggcaacgagatcaacgtggaatactccaaccacgcctggcagtgcgatcacaccagagccgatatcctgctggtggaccagtttggccaactgctgggtagaccttggctgaccacagtggtggacacctacagcagatgcatcatgggcatcaacctgggcttcgacgcccctagctctcaggttgtgtctctggccctgagacacgccatgctgctgaagtcctacagctccgattacggcctgcacgaggaatggggcacatacggcaagcccgagtacttctacaccgacggcggcaaggacttccggtccaatcatctgcagcagatcggcctgcagctgggcttcacatgccacctgagaagcagacctagcgaaggcggcgtggtggaaagacccttcaagaccctgaacacagaggtgttcagcaccctgcctggctacacaggcggcaacgtgcaagagagatctgaggacgccgagaaggacgccagcctgacactgagacagctggaaagaatcatcgtgcgctacatcgtggacaactacaaccagcggatggacgccagaatgggcgagcagaccagattccagagatgggatagcggcctgctgagcatccctgatctgctgagcgaacgcgacctggacatctgcctgatgaagcagtctagacggcgggtgcagaaaggcggctacctgcagttcgagaacctgatgtaccagggcgagtacctggccggctatgagggcgagacagtgatcctgagatacgaccccagagacatcaccgccatcctggtgtacagaaacgaaggcaacaaagaagtgttcctgaccagagcctacggcctggacctggaaacagagagcatgagctgggaagatgccaaggccagcgccaagaaagtgcgcgagtctggcaagaacctgagcaacagatccatcctggccgaagtgaaagagcggcacaccttcagcgacaaaaagaccaagaaagagaggcagcggcaagagcaagaacaagtgaagccttatattccatctccggtgctgaaagaagtcaaagagcagaccgacaaggccaccgacaccgacatgagcgaggaacccatcgtggaagtgttcgactacagccagctccaggacgactacggcttctga

SEQ ID NO: 39 - DNA, 828 bp, Artificial Sequence
  Synthetic
atggaagccaaggctatcgcccaagagctgggcaacatcgagatccccgaagagaagctgcagatggaaatcgagcggctgaacagcaagaccctggtgtccctggaacaggtggccaagctgcacgagtacttcgagggcaagagacagagcaagcagagctgcagagtcgtgggcgagagcagaaccggaaagaccatggcctgcgacagctaccggctgagacacaagcccatccagaaagtgggacaccctcctcaggtgcccgtggtgtacatccagattcctcaggactgcggcaccaaagagctgtttcagggcatcatcgagtacctgaagtaccagatgaccaagggcacaatcgccgagatcagacagcgggccatcaaggtgttgcaaggctgcggcgtggaaatgatcatcatcgacgaggccgaccggttcaagcccaagacctttgctgaagtgcgggacatcttcgacagactgaacatccccatcgtgctcgtgggcaccgatagactggacaccgtgatcaagcgggacgaacaggtgtacaaccggttcagaagctgctacagattcggcaagctgtctggcgccgacttccagaacaccgtgaacatctgggagaaacaggtgctgaagctgcccgtggccagcaacctgatccagaccaagatgctgaaactgatcgccgaggccacaggcggctatatcggcctgatggacaccatcctgagagagagcgccatcagaagcctgaagcggggcctgaacaagatcaccttcgagatcctgaaagaagtgacccaagagttcaagtga

SEQ ID NO: 40 - DNA, 483 bp, Artificial Sequence
  Synthetic
atggacctgcagatccagaactggctgttcatcctggtgccttacgagggcgagagcatcagccactttctgggcagattcagacgggccaacagcctgtcttgtggcggactgggacaagccacaggactgtactctgccattgccagatgggagaagttccggttcaaccctccacctagcctgaagcagctggaaaagctgagcgagatcgtgcaggtcgagatggccacactgcagaccatgtttcccagcgctcccatgaagatgacccctatcagaatctgcagcgcctgctacggcgagaacccctaccatcagatgagctggcagtacaaagaaatctacagatgcgaccggcacaacctgaacatcctgagcgagtgccctaactgcgccgccagattcaagttccccaacctttggttcgagggcttctgccacagatgcttcacccctttcgagcagatgccccagagctga

SEQ ID NO: 41 - DNA, 500 bp, Artificial Sequence
  Synthetic
agaaagtggacgagaagctctattttgctatccttgttttaattttggcagtaattgtttgactacttattaaaataaaattgatggaaaagttaaaaatcagtctgaaaatgcttttgaataactttgataaaaaatcttgtacagtaacagattatttgtcgtgataacaaattcgtgtcatctaaaaataagactcttaaaatccttatatatcaacaattataacttatccttaccctaaaatcacactcgattgtatcttaaaatagattaacaaattaagtgtcattttccctaaaaataacaaattagatgtcgccttcggaaaaggcgattttttttgtttttgagtggcaattcacagattaaatgtcatagaataataagtacacatcaactttgattttattaaacataaaaatatcagctatgactattgaaaatcaaatttctgaatctcaggaactgatttctcaactttctcccgaagaacaggc

SEQ ID NO: 42 - DNA, 500 bp, Artificial Sequence
  Synthetic
gcttttattttgaactaaaactctactaattagaatctgtcatcgagacgaaacaaaacgatcatattttctttttaaagttataatttcaatagtgccgtagatcaagttttaacaacctctgttctatgaaaaatgaggagtagtttactttttacaagaagtttgctttcggctcctgctaactacttgccctgatgctgtctatcttaggatagagaaactaggcgcactcccagcaataagggtgcaggtgtactgctatagcggttagcaaatcactttcgatcgaggaagaattctctttgagaattgaaagcgagtcctgtcgcacccaatcatttagacgacattaatctgttatcacgtcatctaatttgttaagacgacactaatctgttaccgatgacaaataatttgttactgtacatcaatttaaaatacgagccaacggctaagtaatacacgggtgcgacaggactcgaacctgtgaccgactg

SEQ ID NO: 43 - DNA, 1857 bp, Artificial Sequence
  Synthetic
atgcccgacaaagagtttggactgaccggcgagctgacccagattaccgaggccatctttctgagcgagagcaacttcgtggtggaccctctgcacatcatcctggaaagcagcgacagccagaagctgaagttcaacctgatccagtggctggccgagtctcccaacagacagatcaagagccagcggaagcaggccgtggctgatacactgggagtgtccaccagacaggtggaacggctgctgaaagagtacaacggcgaccggctgaatgagacagctggcgtgcagagatgcgacaagggcaagcacagagtgtccgagtactggcagcagtacatcaagaccatctacgagaacagcctgaaagaaaagcaccctatgagccccgccagcgtcgtgcgggaagtgaaaagacacgccatcgtggatctgggcctcgagcacggcgattatcctcatcctgccaccgtgtaccggatcctgaatcctctgatcgagcagcagaagcggaagaagaagatcagaaaccccggcagcggcagctggctgaccgtggaaacaagagatggcaagcagctgaaggccgagttcagcaaccagatcatccagtgcgaccacaccgagctggacatcagaatcgtggacagcaacggcgtgctgctgcccgaaagaccttggctgacaaccgtggtggataccttcagcagctgcgtgctgggctttcacctgtggatcaagcagcctggaagcgccgaagttgccctggctctgagacacagcatcctgcctaagcagtaccctcacgactacgagctgagcaagccttggggctacggccctccattccagtactttttcaccgacggcggcaaggacttcagatccaagcacctgaaagccatcggcaagaaactgcggtttcagtgcgagctgcgggacagacctaatcaaggcggcatcgtggaacggatctttaagaccatcaacacccaggtgctgaaggacctgcctggctacacaggcagcaacgtgcaagagaggcctgagaacgccgagaaagaggcctgtctgggcatccaggacatcgacaagatcctggccagcttcttctgcgacatctacaaccacgagccgtatcctaaggaccccagagagacaagattcgagcggtggttcaaaggcatgggcggcaagctgcctgagcctctggatgagagagagctggatatctgcctgatgaaagaaacccagagagtggtgcaggcccacggcagcatccagttcgagaacctgatctacagaggcgagagcctgagagcctacaagggcgagtacgtgaccctgagatacgaccccgaccacatcctgacactgtacgtgtacagctgcgacgccaacgacgatatcggcgactttctgggctatgtgcacgccgtgaacatggacacccaagagctgtccatcgaggaactgaagtccctgaacaaagagcggagcaaggccagaagagagcacagcaattacgacgccctgctggccctgggcaagagaaaagagctggtcaaagagcgcaagcaagagaagaaagagcggcggcaggccgagcagaagagactgagaagcggcagcaagaaaaactccaacgtggtggaactgagaaagagccgggccaagaactacgtgaagaacgacgaccccatcgaggtgctgccagagagagtgtcccgggaagagatccaggtgccaaagaccgaggtgcagatcgaggtgtccgagcaggccgacaacctgaagcaagaaagacaccagctcgtgatcagcagacggaagcagaacctgaagaacatctggtga

SEQ ID NO: 44 - DNA, 855 bp, Artificial Sequence
  Synthetic
atggcccagagccagctggtcatccagcctaacgtggaaacactggcccctcagctggaactgaacaatcagctggccaaggtggtggaaatcgaggaaatcttcagcaactgcttcatccccaccgaccgggcctgcgagtacttcagatggctggacgagctgcggatcctgaagcagtgtggcagagttgtgggccccagagatgtgggcaagagcagagcctctgtgcactacagagaagaggaccggaagaaagtgtcctacgtcagagcttggagcgccagcagcagcaagagactgttcagccagattctgaaggacatcaaccacgccgctcctaccggcaagagagaggatctcagacctagactggccggcagcctggaactgttcggaatcgagcaagtgatcgtggacaacgccgacaacctgcagagagaggcactgctggacctcaagcagctgttcgacgagagcaacgtgtccgtggtgctcgttggaggccaagagctggacaagatcctgcacgactgcgacctgctgaccagctttcccacactgtacgagttcgacaccctggaagatgacgacttcaagaaaaccctgagcaccatcgagttcgatgtgctggcactgccccaggcctctaatctgtgtgaaggcatcaccttcgagatcctggtgcagagcacaggcggcagaatcggcctgctggttaagatcctgaccaaggccgtgctgcacagcctgaagaatggcttcggcagagtggaccagaacatcctggaaaagatcgccaacagatacggcaagcggtacatccctcctgagaaccggaacaagaacagctga

SEQ ID NO: 45 - DNA, 555 bp, Artificial Sequence
  Synthetic
atggaaaaggacacgttccctccaaagaccgagatcagaatccacgacaaccacgaggccctgcctagactgggctacgtggaaccttatgagggcgagagcatcagccactacctgggcagactgcggagattcaaggccaacagcctgcctagcggctacagcctgggaaagatcgccggaattggcgccgtgaccaccagatgggagaagctgtacttcaacccatttcctagcagcgaggaactggaagccctgggcaagctgattggcgtgccagccaaccggatctacgagatgttgcctcctaagggcgtgaccatgaagcccagacctatcagactgtgcgccgcctgttatgccgaggtgccctgtcacagaatcgagtggcagtacaaggacaagctgaagtgcaaccaccacaacctgggcctgctgaccaagtgcaccaactgcgagacaccctttcctatacctgccgactgggtgcagggcgagtgccctcactgttttctgccctttgccaagatggccaagcggcagaaaccccggtaa

SEQ ID NO: 46 - DNA, 500 bp, Artificial Sequence
  Synthetic
ttgatggctgaaagctaggaaatacgtaaattatgcgtttagcactgtcaaatggacaataattctttaaaactgacaataattatttaaagtacatattgtacattcgcacattatatgtcgcaatttgcaaacaacgacattagacgacattagcatcttgagcatctaaaacgcttatcgtataaagctttcaggaaattgttaattaaaaacgttaaattcctgacttcgcacattgtatgtcgctaacattaaagctcgcaaattaatgtcgttaatctaaattttgtcacattgcaaattcaatgtcgcattttcttcagttaatggtacattaatactaccaataactacattctcctcgcttaaatgccagacaaagaatttggattaaccggagaattgacacaaattacagaagctattttccttagtgaaagtaattttgtggtcgatccattacacattattctggaatcctcagatagccagaaact

SEQ ID NO: 47 - DNA, 500 bp, Artificial Sequence
  Synthetic
catcccggctaggggtgggttgaaagagtaagaagaatagaagtaatttcctgaaatcaactatatttggacatattttaggaatataactaaattatgggagggttgaaaggagcgctgcgatcaaacaaatgttaaggtaaaataattcgtctgtagcaaataccacagttaatgagtaagccatacgacgttaatttgcgaaaaactaatatgattgaattaacgacgcgaattagcgaaagtaatgttaattacctaaaaacgacatcaatttgcgaaaagcgacaaataatgtgcgaatgtacacatatggagaatagggaactcgaatccctgacctctgcggtgcgatcgcagcgctctaccaactgagctaattcccctgactttgttgagtgttcagttaatcacactcgtccatcatagagtattttaacattcagttagggatggctgagatttgttgccagaaaaaacttcttgtactcgctctagtt

SEQ ID NO: 48 - DNA, 1962 bp, Artificial Sequence
  Synthetic
atgtctgccctggacgtggacgacgacttcgagctggaagaggacacatacctgctgggcgacgaggacgccgacctgtttgatgatagcagcgacgtgatcctggtcaacgaggactacgacaccgccgaagaggataagagcgtggaattcctggaccagcggttcctggaagatagcgagctgagactgagcggcgagcagaggctgaagctggaaatcatcagaagcctgggcgagccctgcgacagaaagacatatggccagaagctgaaagaggccgcacagaagctgggcaagagcgagagaacagtgcggagactggtcaaggcctggcaagagaatggcctggccacctttgccgaaaccgccagagctgataagggccagaccagaaagagcgagtactggtacaacctgaccgtcaagacctacaaggcccggaacaagggcagcgaccggatgacaagaacacaggtggccgagaagatcgccatcagagcctatgagctggccaagaacgagctgaagcaagagatcagcaagctcgagacacagggcttcagaggcgaggaactggactggaaggtggacaccctgatcaagaccaaggccaagaccgagggcttcaactactggcagaagtacggcaaggccccttgcgccagaaccgtggaaagatggctgaagcccctggaagagaagaagcacaagagccggaccagcagatctcctggctggcacggatctgagcacgtgatcaaaacccgggacgaccaagagatctccatcaagtacagcaatcaagtgtggcagatcgaccacaccaaggccgatctgctgctggtggatgaggacggcgaggaaattggcagacctcagctgaccaccgtgatcgactgctacagcagatgcatcgtgggcctgagactgggctttgccgcaccatcttctcaggtggtggctctggccctgagaaacgccatcatgcccaagagatacggcagcgagtacgagctgaggtgcaagtggagtgcctacggcgtgcccagatacgtgtacacagatggcggcaaggacttccggtccaagcacctggtggaatggatcgccaacgagctggatttcgagcccatcctgagaagccagccttctgacggcggaatcgtggaaaggcccttcagaacaatgagcggcctgctgtctgagatgcctggctacacaggcagcagcgtgaaggatagacctgagggcgccgagaaaaaggcctgcatctctctgcctgagctggaaaagctgatcgtgggctacatcgtggacagctacaaccagaagccagacgccagatcacaggccaatcctttcacacccaagcagagccggatcgagagatgggagaagggcctgcagatgcctcctacactgctgaacgacagagagctggacatctgcctgatgaaggccgccgagagagtggtgtacgacaacggctacctgaacttcagcggcctgagatacaggggcgagaatctgggagcctacgccggcgagaaagtgatcctgagattcgaccccagagacatcacaatggtgctggtgtacggccggaccaacaacaaagagatctttctggccagggcctatgccgtgggactcgaagcagagaggctgagcatcgaggaagtgaagtacgcccggaagaaggccgagaatagcggcaagggcatcaacaatatcgccatcctcgaagaggctatccggcggagaaacttcctggacaagaagaaaaacaagaccaaagccgagcggaggcggagcgaggaaaagagagttgagcagatccctcaggtgctgaaggacaagaaacccgaacaggtggaaagcttcaacagccagcctgaggccgacgagtccatcgagaagctggatctgaagtccctgcgggaagaactgggcctgtaa

SEQ ID NO: 49 - DNA, 807 bp, Artificial Sequence
  Synthetic
atgaccaacgaggaaatccagcaagagatcgagcggctgagacagcccgacatcctgaacatcgagcaagtgaagagattcggcgcctggctggacgagcggagaaagctgagaaaacctggcagagccgtgggcgattctggcctgggaaaaacaaccgccagcctgttctacacctaccagaaccgggccgtgaagatccccaatcagaaccctgtggtgcccgtgctgtacgtggaactgacaggcagcagctgtagccccagcctgctgttcaagaccatcatcgagacactgaagttcaaggccaaaggcggcaacgagacacagctgagagagagagcctggtacttcatcaagcagtgcaaggtggaagtgctgatcatcgacgaggcccaccggctgcagtttaagacactggctgatgtgcgggacctgttcgacaaagtgaagatcgtgcctgtgctcgtgggcaccagcagcagactggataccctgatcagcaaggacgaacaggtggccggcagattcgccagctacttcagcttcgagaagctgtccggcgccaatttcatcaagatcctgaagatctgggagcagcagatcctgaggctgcccgagccttctaatctggccgacagccaagagatcatcaccatcctgcaagagaaaaccagcggccagatccggctgctggaccagattctgagagatgccgccgtgaaggccctggaatctggcgtgaacaagatcgacaagagcctgctggacagcatcgagggcgattatagcctcgtgggctcctga

SEQ ID NO: 50 - DNA, 510 bp, Artificial Sequence
  Synthetic
atgtgcaacgagatctacaacttcgaggcctggatcaacatcgtggaaccctttccaggcgagagcatcagccactttctgggcagattcgagcgggccaatctgctgacaggctaccagatcggaaaagaggccggcgttggagccatcgtgaccagatggaagaagctgtacctgaatccgtttccgacacagcaagagctggaagccctggccaacttcgtggaagtggccaccgagaagctgaaagaaatgctgcccgtgaagggcatgaccatgaagcccagacctatcaagctgtgcgccgcctgttatgccgagcagccctatcacagaatcgagtggcagtacaaggacaagctgaagtgcgaccggcacaacctgagactgctgaccaagtgcaccaactgtcagaccccttttcctattcctgccgactgggtggaaggcaagtgcagccactgcagcctgagatttgccaccatggccaagcggcagaaacccagataa

SEQ ID NO: 51 - DNA, 500 bp, Artificial Sequence
  Synthetic
aaaaagcattgagagaccctttcacaaaggcaatcatcctcgctcaataattacaattctcaacacttaagtccaacttgcctggagtaaagccatcaatctgtcaacgcggacaaataatttggcaatcgacactgtagagcgacaaattatttgaccacatcgacaaattatttgtcacattaatacattagtgaacaatccttatataccaatacttttcaccatttgatagctaagaaagctgtttaggttgtctgccacaaattatgtgtcatttttttagtaatccgacacattaagcgtcatttgttaatttggcgaaaaattagctgtcaattcttcacagctttatagtagtataaatgtacgttagtttttcacaaaaaaattacatctatgagcgctttagatgtagatgacgattttgaactggaagaagatacctacctattaggtgatgaagatgcagacctgttcgatgactcatcggatgtaat

SEQ ID NO: 52 - DNA, 500 bp, Artificial Sequence
  Synthetic
agttttaacaaccatcccaattagggctgggttgaaagcaaatttttgtcgttactatgtgaaatatttgtttgaattaggagggttgaaaggcgcacttcgttcgggataattccgacactgtgtatagtaaaatctatgcgacttcaattaggaaaatcatctctggaaagagattgacaaataatttgtcgttttggttttttgacaaataatatgtcgccacggacagataatttgtcgctttacaacaataatcgggatgactggattcgaaccagcggccccttcgtcccgaacgaagtgcgctaccaagctgcgctacatcccggcataataagcccattgtttaaatatgatatcattaataatggtaaatgtacacccatgctgatttttatttgggaaattgcgatcgcctgggtagaatagtcgaatcacctgaaagttctgattttcaaaacatggtgactaacagtaatcatcagtgagataatttt

SEQ ID NO: 53 - DNA, 1683 bp, Artificial Sequence
  Synthetic
atgctggacgagcacagcaacggcgatcaagagcccgagaacgacgagatcgtgacagagctgagcgccgacaaccggcatctgctggaaatgatccagcagctcctggaaccttgcgaccggatcacatacggcgagagacagagagaggtggccgccaagctgggaaagtctgtgcggacagttcggcggctggtcaagaagtgggaagaagaaggactggccgctctgcagacaaccgccagagccgataagggcaagcacagaatcgacaccgactggcagcagttcatcatcaagacctacaaagagggcaacaagggcagcaagcggatcacccctcagcaggttgccattagagtgcaggccagagctgccgagctgggccagaagaagtaccccagctaccggaccgtgtacagagtgctgcagcccatcatcgagcagcaagagcagaaggccggcgtcagatctagaggctggcacggctctagactgagcgtgaaaaccagagatggcaaggacctgagcgtggaatactccaaccacgtgtggcagtgcgaccacaccagagtggatctgctgctggtggatcagcacggcgaactgcttggtagaccttggctgaccaccgtggtggacacctactccagatgcatcatgggcatcaacctgggcttcgacgcccctagttctcaggttgtggccctggccgttagacacgccattctgcctaagcagtacggcagcgagtacggcctgcacgaggaatggggcacatatggcaagcccgagcacttctacaccgacggcggcaaggacttcagaagcaaccatctgcagcagattggcgtgcagctgggctttgtgtgccacctgagagacaggccatctgaaggcggcatcgtggaaagacccttcggaaccttcaacaccgatttcttcagcaccctgcctggctacaccggcagcaatgtgcaagaaagacctgagcaggccgagaaagaggcctgtctgaccctgagagagctggaacacagattcgtgcggtacatcgtggacaagtacaaccagcggcctgacgccagactgggcgatcagacaagatatcagagatgggaggccggactgatcgctagccccaacgtgatcagcgaggaagaactgcggatctgcctgatgaagcagacccggcggagcatctacagaggcggctatctgcagttcgagaacctgacctaccggggcgaaaatctggccggatatgctggcgagagcgtggtgctgagatacgaccccaaggacatcaccacactgctggtgtacagacacagcggcaacaaagaagagttcctggccagagccttcgctcaggacctggaaacagaacagctgagcctggatgaggccaaggccagctccagaaagattagacaggccggcaagatgatcagcaaccggtccatgctggccgaagtgcgggacagagaaaccttcgtgacccagaaaaagaccaagaaagagcggcagaaagccgaacaggccgtggtcgagaaggccaagaaacccgttcctctggaaccagagaaagaaatcgaggtggccagcgtggacagcgagagcaagtatcagatgcccgaggtgttcgactacgaggaaatgcgggaagagtacggctggtga

SEQ ID NO: 54 - DNA, 837 bp, Artificial Sequence
  Synthetic
atgacaagcaagcaggcccaggccattgctcagcagctgggagacatccccgtgaacgatgagaagctgcaggccgagatccagcggctgaacagaaagagcttcatccctctggaacaagtgaagatgctgcacgactggctggacggcaagagacagagcagacagtctggcagagtgctgggcgagagcagaaccggcaagaccatgggctgtgacgcctacagactgcggcacaagcctaagcaagagcccggcaaacctcctacagtgcccgtggcctacatccagattcctcaagagtgcagcgccaaagagctgttcgccgccatcatcgagcacctgaagtaccagatgaccaagggcaccgtggccgagattcgggaaagaaccctgagagtgctgaaaggctgcggcgtggaaatgctgatcatcgacgaggccgaccggttcaagcccaagacctttgctgaagtgcgggacatcttcgacaagctggaaatcgccgtgatcctcgtgggcaccgatagactggatgccgtgatcaagcgggacgaacaggtgtacaaccggttcagaagctgccacagattcggcaagttcagcggcgaggacttccagcggacagtggaaatctgggagaaacaggtgctgaagctgcctgtggccagcaacctgagcagcaagacaatgctgaaaaccctgggcgaaaccaccggcggctatatcggactgctggacatgatcctgagagagagcgccattcgggccctgaagaaaggcctggccaagatcgacctggaaaccctgaaagaagtggccgccgagtacaagtga

SEQ ID NO: 55 - DNA, 510 bp, Artificial Sequence
  Synthetic
atggaagtgcccgagatccagagctggctgttccaggtggaacctctggaaggcgagagcctgtctcacttcctgggcagattcagacggaccaacgatctgacagccaccggcctgggaaaagccgctggacttggcggagtgattgccagatgggagaagttccggttcaaccctccacctagccggcagcaactggaagccctggctaaagttgtgggcgtgaacgccgatagactggcccaaatgcttcctcctgctggcgtgggcatgaagatggaacccatcagactgtgcgccgcctgctacgtggaaagcccttgtcacaagatcgagtggcagctgaaagtgacccagggctgcgccagacacaatctgtctctgctgagcgagtgccccaattgcggcgccagattcaaagtgcctgctgtgtgggtggacggctggtgccagagatgctttctgaccttcgccgacatggtcaagcaccagaagtccatcgactactga

SEQ ID NO: 56 - DNA, 500 bp, Artificial Sequence
  Synthetic
cattgagagaccctttcacaaaggcaatcatcctcgctcaataattacaattctcaacacttaagtccaacttgcctggagtaaagccatcaatctgtcaacgcggacaaataatttggcaatcgacactgtagagcgacaaattatttgaccacatcgacaaattatttgtcacattaatacattagtgaacaatccttatataccaatacttttcaccatttgatagctaagaaagctgtttaggttgtctgccacaaattatgtgtcatttttttagtaatccgacacattaagcgtcatttgttaatttggcgaaaaattagctgtcaattcttcacagctttatagtagtataaatgtacgttagtttttcacaaaaaaattacatctatgagcgctttagatgtagatgacgattttgaactggaagaagatacctacctattaggtgatgaagatgcagacctgttcgatgactcatcggatgtaatacttgt

SEQ ID NO: 57 - DNA, 500 bp, Artificial Sequence; identical to SEQ ID NO: 52
  Synthetic

SEQ ID NO: 58 - DNA, 1740 bp, Artificial Sequence
  Synthetic
atgggcgagacactgaacagcaacgaggtggacgagagcctggtgctgtacgatggctctgacgaagtggatgagatcagcgagagcgaggacaccaagcagagcaacgtgatcgtgaccgagctgagcgaagaggccaagctgagaatgcaggtcctgcagagcctgatcgagccctgcgacagaaagacctacggcatcaagctgaagcaggccgccgagaagctgggaaagaccgtcagaacagtgcagcggctggtcaagaagtaccaagagcagggactgagcggcgtgacagaggtggaaagatctgacaaaggcggctaccggatcgacgacgactggcaggacttcatcgtgaaaacctacaaagagggcaacaaaggcggacggaagatgacccctgctcaggtggccatcagagtgcaagttcgcgctggacagctgggcctcgagaagtacccttgtcacatgaccgtgtaccgggtgctgaaccccatcatcgagcggaaagaacagaaacagaaagtgcggaacatcggctggcggggcagcagagtttctcaccagacaagagatggccagacactggacgtgcaccacagcaatcacgtgtggcagtgcgaccacaccaagctggatgtgatgctggtggaccagtacggcgaaaccctggctagaccttggctgaccaagatcaccgacagctacagccggtgcatcatgggcatccacctgggctttgatgcccctagctctctggtggtggccctggctatgagacacgccatgctgaggaagcagtacagcagcgagtacaagctgcactgcgagtggggcacatatggcgtgcccgagaacctgtttaccgacggcggcaaggacttcagaagcgagcacctgaagcagatcggcttccagctgggattcgagtgtcacctgagagacagacctccagaaggcggcatcgaggaaagaggcttcggaacaatcaataccagcttcctgagcggcttctacggctacctggacagcaacgtgcagaagaggcctgagggcgccgaagaggaagcctgtatcacactgagagagctgcatctgctgatcgtgcggtacatcgtggacaactacaaccagagaatcgacgccagaagcggcaaccagaccagattccagagatgggaagccggccttcctgctctgcccaacctggtcaatgagcgcgagctggacatctgcctgatgaagaaaacccggcggagcatctacaaaggcggatacgtgtccttcgagaacatcatgtaccggggcgactacctgtctgcctatgccggcgaatctgtgctgctgagatacgaccccagagacatcagcaccgtgttcgtgtacagacaggacagcggcaaagaggtcctgctgtctcaggcccacgccatcgatctggaaaccgagcagatcagcctggaagagacaaaggccgccagcagaaagatccggaatgccggcaagcagctgagcaacaagtctatcctggccgaggtgcaggaccgggacacctttatcaagcagaagaagaagtcccacaagcagcggaagaaagaggaacaggcccaggtccacagcgtgaagtctttccagaccaaagaacccgtggaaaccgtggaagagatccctcagcctcagaaaagacggcccagagtgttcgactacgagcagctgcggaaggactacgacgattga

SEQ ID NO: 59 - DNA, 837 bp, Artificial Sequence
  Synthetic
atggccgaggactacctgagaaaatgggtgcagaacctgtggggcgacgaccccattcctgaagaactgctgcccatcatcgagcggctgatcacacctagcgtggtggaactggaacacatccagaagatccacgactggctggacagcctgagactgagcaagcagtgcggcagaattgtggcccctcctagagccggcaagagcgtgacatgtgacgtgtacaagctgctgaacaagccccagaagagaaccggcaagcgggacattgtgcccgtgctgtatatgcaggctcccggcgattgctctgctggcgaactgctgacactgatcctggaaagcctgaagtacgacgccaccagcggcaagctgaccgacctgagaagaagagtgctgcggctgctgaaagaaagcagagtggaaatgctcgtgatcgacgaggccaacttcctgaagctgaacaccttcagcgagatcgcccggatctacgacctgctgaagatcagcatcgtgctcgtgggcaccgacggcctggacaacctgattaagaaagagcggtacatccacgaccggttcatcgagtgctataagctgcccctggtgtccgagaacaagttccccgagttcgtgcagatctgggaagatgaggtgctgtgcctgcctgtgcctagcaatctgatcaagagcgagacactgaagcccctgtaccagaaaacctccggcaagatcggcctggtggacagagttctgagaagggccgccatcctgagcctgagaaagggcctgaagaatatcgacaaggccacactggacgaggtgctcgagtggttcgaatga

SEQ ID NO: 60 - DNA, 528 bp, Artificial Sequence
  Synthetic
atggaaatccctgccgagcagcccagattcttccaggtggaacctctggaaggcgagagcctgtctcacttcctgggcagattcagaagagagaactacctgaccgccacacagctgggcaagctgacaggcattggagccgtgatcagcagatgggagaagttctacctgaatccgtttccgacacctcaagagctggaagccctggccgctgtggtggaagtgaaagtggaccggctgatcgagatgctgcctcctaagggcgtgaccatgaagcccagacctatcagactgtgcggcgcctgctaccaagagtccccttgtcacagagtggaatggcagttcaaggacaagctgaagtgcgtgtccgaggctcaccccaaggatgccagacatcaactgggcctgctgacaaagtgcaccaactgcgagacaccctttcctatacctgccgactgggtgcagggcgagtgccctcactgttttctgcccttcgccaagatggccagacggcagaagagatactga

SEQ ID NO: 61 - DNA, 600 bp, Artificial Sequence
  Synthetic
ttaatataataattattcaaatcaataaacacatcacagccttctaacttcaaaaacttccaaatatcccccgttgttactgcaccataaatagttgtcgaataactaattaaatgtcgtcttaacaaattaatgtcgctcaaaacgtaaaggctataatcgttactaagcaaggattatagcctttttgatttctatttagcattcctaaatatttaactaattaaacgtcgtaatttgtaaatataacaaaataagtgtcgttttttcaaaaaatctctttccaaagtttttaacggctcataacaaaataagtgtcgtcttttggaagtgagtaaaaaatctaaaattacgtgtcgctttttggaataaagtagtagtatatttactaggtaatagtaattatgtacgaataaggtgttacgcatttaatttttttgcccaaaagccttgcagcaaggactttaggctgcaaaatattacatttagatgcgcgtcagcttacaaacatagttgtactcaagtcttcttatttctctctacttgcaaagtcattcctcatattgcgttaaaggttgatgtgagttgaggctgtatact

SEQ ID NO: 62 - DNA, 607 bp, Artificial Sequence
  Synthetic
ggttcaacgaccatcccggctaggggtgggtttaaacgacgggaagagcaaatctgttactgctgtatgcagcaaggtttcaacaactatcccgggtcaagtttgcttgtgagggttgaaaggaatgtcaccttcccaatactagaagagtgtcaaaagctatgctggctaatggaaggttgaaattaatcgctatttttttgcaaagaaaagattctaccagttataaaaaagcaagagtgacaaacaattagtcgttcaaacaaatgacaaattgtttgtcgctctaaagtatcctagattacttgactatacgagtttattttttagggattaagctcggggaaaagtttgtgatctactgacattcaagtaacactgacaaataatttgtcactgtacaatactcaataagagtcggctacattaaatgactataagacaaataatttgtcgctttaccacttttgacaaataatttgtcgccacggtcaaataatttgtcgctctacatttgaaagcgggcgatgggactcgaacccacgacgttcaccttgggaaggtgacattctaccactgaattacacccgcaaatggatgttagcct

SEQ ID NO: 63 - DNA, 1617 bp, Artificial Sequence
  Synthetic
atggtcatccagacactgctggaaccctgcgacagaaccacctacggccagaagctgaaagaggccgccgatacactgggagtgacagtgcgaacagtgcagcggctggtcaagaagtgggaagaggacggactcgtgggctttatccagaccggcagagccgataagggcaagcacagaatcggcgagttctgggagaacttcatcatcaagacctacaaagagggcaacaagggcagcaagcggatgacccctaaacaggtggcactgagagtgcaggccaaggccagagagctgggcgatagcaagcctcctaactaccggaccgtgctgagagttctggcccctatcctggaacagaaagaaaagaccaagagcatcagaagccccggctggcggggaacaacactgagcgtgaaaaccagagaaggccaggacctgagcgtggactacagcaatcacgtgtggcagtgcgaccacaccagagtggatgtgctgctggtggatcagcacggcgagctgctttctagaccttggctgaccaccgtgatcgacacctacagcagatgcatcatgggcatcaacctgggcttcgacgccccttcttctgtggtggttgctctggccctgagacacgccatcctgcctaagaaatacggcgccgagtacaagctgcactgcgagtggggcacatacggcaagcctgagcacttctacaccgacggcggcaaggacttcagatccaaccacctgtctcagatcggcgctcagctgggctttgtgtgtcacctgagagacagacctagcgaaggcggcatcgtggaaagacccttcaagaccctgaacgaccagctgttcagcaccctgcctggctacacaggcagcaacgtgcaagagcggctggaagatgccgagaaggatgccaagctgaccctgagagaactggaacagctgcttgtgcggtacatcgtggaccggtacaaccagagcatcgacgccagaatgggcgatcagaccagattcggaagatgggaggccggactgccttctgtgcctgtgcctatcgaggaacgcgacctggacatctgcctgatgaagcagagccgcagaaccgttcagagaggcggctgtctgcagttccagaacgtgatgtaccggggcgagtacctggctggatatgccggcgagacagtgaacctgagatacgaccccagagacatcaccaccgtgctggtgtaccggcaagagaagtcccaagaggtgttcctgaccagaacacacgcccagggactcgagacagaacagctgagcctggatgaagccgaggctgcctctcggagactgagaaatgccggcaagaccgtgtccaatcaggccctgctgcaagaagtgctggaacgggacgctatggtggccaacaagaagtcccggaaagagcggcagaagctcgagcaggccattctgagatctgccgccgtgaacgagagcaagacagagtctctggccagcagcgtgatggaagccgaagaggtggaaagcaccaccgaggtgcagagcagctctagcgaactggaagtgtgggactacgagcagctgcgggaagagtacggcttctga

SEQ ID NO: 64 - DNA, 831 bp, Artificial Sequence
  Synthetic
atgaccgacgccaaggccattgctcagcagctcggcggagtgaagcctgacgaagaatggctgcaggccgagatcgccagactgaagggcaagtctatcgtgcccctgcagcaagtgcggagcctgcatgattggctggacggcaagagaaaggcccggcagttctgtagagtcgtgggcgagtctagaaccggcaagaccgtggcctgtgacgcctacagataccggcagaaagtgcaggctgaagtgggcagacctccaatcgtgcccgtggtgtatatccagcctcctcagaagtgcggcgccaaggacctgttccaagagatcatcgagtacctgaagttcaaggccaccaagggcaccgtgtccgacttcagaggcagaaccatggaagtgctgaaaggctgcggcgtggaaatgatcatcgtggacgaggccgatagactgaagcccgagacatttgccgaagtgcgggacatctacgacaagctgggaatcgccgtggtgctcgtgggaaccgacagactggaagccgtgatcaagcgggacgaacaggtgtacaaccggttcagagcctgccacagattcggcaagctgagcggcaaggacttccaggatacagtgcaggcctgggaagataagatcctgaagctgcccctgcctagcaacctgatcagcaaggacatgctgcggatcctgaccagcgccacagagggctatatcggcagactggacgagatcctgagagaggccgccatcagaagcctgtccagaggcctgaagaaaatcgacaagcccgtgctgcaagaggtggcccaagagtacaagtga

SEQ ID NO: 65 - DNA, 504 bp, Artificial Sequence
  Synthetic
atggctgcccctgatgtgaagccctggctgttcatcatccagccttacgagggcgagagcctgagccacttcctgggcagattcagaagggccaatcacctgtctgccagcggcctgggaaaactggctggaattggagccgtggtggccagatgggagagattccacttcaaccccagacctagccagaaagagctggaagccattgccagcctggtggaagtggacgccgatagactggctcagatgctgcctccactcggcgtgggaatgcagcacgagcctattagactgtgcggcgcctgttatgccgaggctccttgtcacagaatcgagtggcagtacaagagcgtgtggaagtgcgaccggcacgagctgaagatcctggccaagtgtcccaattgcgaggcccctttcaagatccccgctctgtgggaagataagtgctgccacagatgcagaacccctttcgccgagatgaccaagtaccagaagatcacctga

SEQ ID NO: 66 - DNA, 500 bp, Artificial Sequence
  Synthetic
ctggcattcttactaatgcagcaaacctcactcagcctgaccaagttgcctctttgtgcgcttggtttattcaactttgatgtacagtgactaattatttgtcactgtacacaagatgtacagtgactaattatttgtcactgtacacaagatgtacagtgactaattgtttgtcgtcgtgacaaattaatgtcgtcgaatgaatccttgcaatacaaaggttttagctatttaagagttattacattatttctcatacgtgactaaataaatgtcgttttccgcaaaaatgacaaattaactgtcgcttcagtaattacaaaaaaggttttgtatattttcataatgacaaattgactgtcgttttctccacgtttagaataacattatgtatttataaattacctttgtttcatgaacaaaaaatcttatgtctgattttactgttcataccgcagtggatactgcggaagctttattacaagacaacaacacacctc

SEQ ID NO: 67 - DNA, 500 bp, Artificial Sequence
  Synthetic
gttgcaaccctccttccggtaatacatggtgaaaacaaattggatatgaaactgccttacgttgtctgatggtgtaattaatttccaagaagtagagggttgaaagcaaatcccgtcatcggcttgtaactaaagttattcaggataagctactcatagaagtgattaaaagagctttttgaatgcaaacgcttataataggggctaaatatatagagaaactccatatataaattgttgcttttccgaaaaatgacaataatttgtcacaaatatatatggaagcgagttactaagttggatgacaataatttgtcacaacgacatcaatttgtcaccgacgacaaataagagaccatttataaagtaaatctttagacgactagacgacgtagcataatacgagtcataacggcatatatggcagcctcactcatttctgggagacgctcataatccttactgagacgacggtactggtttaaccagccaaatgttct

SEQ ID NO: 68 - DNA, 1689 bp, Artificial Sequence
  Synthetic
atgggcgaagattaccccagcgacagcctggaaagcgagacaaacgagatcgtgaccgagctgagctacgaggaacgcagagtgctggaagtgatccagggcctgctggaaccctgcgacagaaagacatacggcgagaagcagagacaggccgctgccaagctgggaaagtctgtgcggaccatcagacggctggtcaagaagtgggaagaacagggacttgccgctctgcagaccaccaccagagtggataagggcagacaccggatcgacaaggactggcaggacttcatcatcaagacctacaaagagggcaacaagggcagcaagcggatcagccctctgcaggtttccatgagagtgaaagtgcgggcctctgagctgggccagaaagagtaccctagctaccggaccgtgtacagggtgctgcagcctgtgattgagcagcaagagcagaaagccaaagtgcggagcagaggctggcggggatctagactgctggttaagaccagagagggcaaagacctgagcgtggaatactccaaccacgtgtggcagtgcgatcacaccctggtggatctgctgctggtggatagacacggcgagattgtgggcagaccttggctgaccaccgtgatcgatacctacagccggtgcatcatgggcatcaacctgggcttcaatgcccctagctctcaggtggtggctctggccctgagacacgccattatgcccaagcactacagcagagagtacgagctgtacgaggaatggggcacctatggcagccccgagcacttttacacagacggcggcaaggacttcagaagcaaccatctgcagcagattggcgtgcagctgggcttcgcctgtcacctgagaaacagacctagcgaaggcggcatcgtggaaagacccttcggcaccttcaacaccgagctgttctctaccctgcctggctacaccggcagcaatgtgcagcagaggcctaaagaggccgagaaagaggcctgcgtcaccctgagagagctggaaaagctgctcgtgcggttcatcgtggacaagtacaaccagagcatcgacgccagaagcggcgaccagaccagattccagagatgggaggccggactgatcgccgtgcctaacatgatcagcgagcgcgacctggacatctgcctgatgaagcagaccagacggaccatctaccgcagcggctacatccagttcgagaacctgacctacaagggcgagaacctcggaggatacgccggcgaaaatgtggtgctgagatacgaccccagagacatcaccaccgtgtgggtgtacagacggaagggctccaaagaagagttcctggccagagctttcgcccaggacctggaaaccgaacagctgtctctggatgaggccaaggccagctccagaaaagttcgcgaggccggcaagaccgtgtccaacagatctatcctggccgaagtgcgggacagacagatcttcaccacacagaaaaagaccaagaaagagcggcgcaagaccgagcaggccgaactgattcaggccaagcagccactgcctgtggaactggaagtggaagaagaggtggaaaccgtcagcaccggctccgagcctgagtatcagatgcctgaggccttcgactacgagcagatgagagaggactacggcttctga

SEQ ID NO: 69 - DNA, 837 bp, Artificial Sequence
  Synthetic
atgaccaatcagcaggcacaggcagttgcacagcagctgggtgcaattccgaccaataatgaaaaacagcaggcagatattcagcgtctgcagggtaaaagctttgttccgctggaaaaagttaaagtgctgcataattggctggaaggtaaacgtcagagccgtctgagcggtcgtgttgttggtgaaagccgtaccggtaaaaccatgggttgtgatgcatatcgtctgcgtcataaaccgattcagaaacatggtaaaccgcctaccgttccggttgtttatattcagattccgcaagaatgtggtgccaaagacctgtttagcatgattatcgaacatctgaagtttcagctggataaaggcaccgttgcaatttttcgtaatcgtgcatttgaagttctggaacgttgtgcagttgaaatggtgattattgatgaagccgatcgtctgaaaccgaaaacctttgccgaagttcgtgatatctttgacaaactgcagattccggttattctggttggtacagatcgtctggatgcagttattaaacgtgatgaacaggtgtataatcgttttcgtgcatgtcatcgttttggtaaactgagcggtgaagattttaaacgcaccgtggaaatttgggaaaagcagattctgaaactgccggttgcaagcaatctgagcagcccgaaaatgctgaaaattctggtggatgcaaccggtggttatattggtctgctggatatgattctgcgtgaagcagcaattcgtgcactgaaaaaaggtctgcagaaaatcgatctgaaaaccctgaaagaagtgaccgaagagtacaaataa

SEQ ID NO: 70 - DNA, 513 bp, Artificial Sequence
  Synthetic
atgcaggccgagaacatccagccttggctgttcagagtggaacccctggaaggcgagagcctgtctcacttcctgggcagattcagacgggccagctacctgacagtgtccggcctgggaaaagaggccgaacttggcggagctgtggccagatgggagaagttcagattcaaccctccacctagccggcagcagctggaaaaactggccgctgtcgtgggagtcgacgtggacagactggttctgatgctgcctccttctggcgtgggcatgaagatggaacccatcagactgtgcggcgcctgttacgccgaaagcagctgccacaagatcaagtggcagttcaagacccggcagggctgcgacagacacaagctgacactgctgagcgagtgccccaattgcggcgccagattcaagatccctgctctgtgggtggacggctggtgccacagatgcttcacccctttcgaggaaatggtcaagttccagaaggacatcaacaccgactga

SEQ ID NO: 71 - DNA, 500 bp, Artificial Sequence
  Synthetic
cactttgcaagtagatgaggtacattctttttttgctcgctactcgctacttgctactcgctactcgctactcgctactcgctacttgctacttgctactccctcaaatgattaggtgtagctcacttggatgatgtcgtttgccaaattaaatgaccacttgacaaattaatgtccttaaaaatatttattccaaaacctttgcaatgcaagggttttattgttttaagcctcttcgagatacaaataaggttattgacaaattaagtgtcctcttttgggactttgacaagttatttgtcctttcttgaaaacaaggctttgactgaaaactttacctaacttgacaaaataaatgtcttctaacgttaaaatacaattatgttttattaggcaattaggtttattatgggtgaagattatcccagtgactcattagagtcagaaaccaacgagattgtgacggaactttcctatgaagaaaggcgtgttttagaagt

SEQ ID NO: 72 - DNA, 500 bp, Artificial Sequence
  Synthetic
gttttaacgcattttcagactttgggctagttgaaagctgcattactaatgagtgtaaaaagtcttgctcaatgcacttggcactttcaagctttgggcaagttaaaagaagcttgatagtgagatacgtgcaattctttcttaggtttcaactttctttcacgctttggcaggttgaaggaaagccaatgcaatcgaaaacaagtaattaagttttaatataaaataaacaataggtgagtggaaagcgaatccagttacgtcctaagcgaatgatttgaagcattcgtggttgatttatatatatatttaaatcaattcagaggacattaatttgtcaacgcggacactaatttggcaaaacggacattaatctggcaacgcggtcaaataatgtggcaagtgacatcacacaacagacaatgttaattatttcaaaaaaatggacgtaactggattcgaaccagtgacctctacgatgtcaacgtagcgctctaacc

SEQ ID NO: 73 - DNA, 1902 bp, Artificial Sequence
  Synthetic
atgcccagaaagcctaccagcgaggcctttcctggcctggaaattgaggaagccgccaatcaagaggaagaacagaccaagcacctcctggtcaacgaggacagcagcgactacctgaagaaggtggaactgatcgacgccatccggcaggcccctaacaaagccgctagaatggatgccattgccgacgccgctaaggccctgggcaagagcacaagaaccatcaagcggatggtggaaaaggtcgagcaagtgggcgttgccacactggccgtgggcagaaaagataagggccagtaccggatcagccagcagtggcacgacttcatcgtgaacctgcacaaatggggcaacagagagggcagcagaatcaaccacaaccagatcttcggctatctgaaagccctcgccagccagggcgaaaagctgctgcacaagaagcacgacgagaagttcaaagagtacagccaagtccgcgaggacctggtggctggaacacacccttctcacgtgaccgtgtacaagatcatcaacagctacctcgagcagaaacacaagaccgtgcggcaccctggaagccctatcgagggacagatcatccagaccaccgagggcatcctggaaatcacccacagcaatcagatctggcaggtcgaccacaccaagctggacatcctgctgatcgatgaagaggacaagaaagtgatcagccggccttacatcaccctggtcatggacagctacagcggctgcgtgaccggcttctatctgggatttgaaccagccggcagccacgaagttggactggctctgagacacgccatcctgcctaagcactacggcaccgagtacgagctgcaggacacctggcagatctacggcatccccgagtacatggtcaccgaccgggccaaagagttcaagagcgagcacctgatccagatcagcctgcagctggacttcaagcggcggctgagagcttttccacaagccggcggactgatcgagacaatcttcggcaccatcaaccagcagatcctgagcctgtacggcggctacacaggcagcagcgtggaagaaagacctcctgaggccgagagaaccgcctgtctgacactggacgacctggaaaagatcctcgtgcggtacttcgtggacaactacaaccggcacgactaccccagagtgaagaaccagaaacggatcgagcggtggaagtcccggctgctggaagaacctgagatcctggaccagagagagctggatatctgcctgatgaaggtcgccatcagaaacgtcgagaagtacggcagcgtgaacttccaaggctgggtgtaccaaggcgactggctgctgaactacgagggcaaacaggtgtccctgagatacgacaagcggaacatcaccagcgtgctggcctacaccagacctatcaatggcgagcccggcgagttcatcggagtgattcaggccagagactgcgagcgcgagagaatgtctctggctgagctgaattacatcaagaagaagctgcgggacgcctgcaaagaggtggacaacagctccatcctgaacgagcggctgagcaccttcgaggacgtggaacagaaccggaaagagcggcggagacacagaagaaagaaggcccagcaaaagcacgaggccaagagcaacaagtccaagatcgtggaactgttccccgagaacctgaccaccgaagagatcattaactcccaagagaacctcaccagcaacttcgacgtgaacgccaagaacatcgtgaatagcatcgacaagcagatcacccagaacaagcccaatcctaaccagaccagcaaggccagacgcagacctagagtgggcgagaaggactggaaccagttcctggaaaacaactggtga

SEQ ID NO: 74 - DNA, 921 bp, Artificial Sequence
  Synthetic
atgagcgagatcaacctggccaacgccaacctggaatttcagaacagctacgacgccagcctgcagagcgctgaggaactgagaagaagccctgaggctcaggccgaggtggaaagaatcggcaaggccaacacctacctgcctctggacagagacaccgagctgttcgactggctggacgatcagagggatgccaagctgtgtggctacgtgacaagcgccacaggctctggactgctgaaagcctgccagctgtacagaacccagtacgtgaagcggagaggcaccctgctggaaatccctgccacagtgctgtacgccgagatcgaacaacacggcggacccaccgatctgtactgcagcatcctggaagagatcggacaccctctggctcacgtgggcacactgagagatctgagatctagagcctggggcaccatcaaaggctacggcgtgaagatcctgatcatcggcaacgccgactacctgacactggaagccttcaacgagctgatcgacgtgttcaccaagatgcggatccccgtgatcctcgtgggcacctactacctgggcgacaatatcctggaacggaagtccctgccttacgtgcgggtgcacgacagctttctggaaagctacgagttccccaacctgaacgaagaggaagtgatcgaggtcgtcaacgactgggaagagaagttcctgcctgagaagcaccggctgaatctgacccagatggaaagcgtggtgtcctacctgcggctgaagtctggcggactgatcgagcctctgtacgacctgctgcggaagatcgccatcctgaagatcgacgagccccacttcgagctgaaccagtacaacctgaccaagagattcggcagacggaaagaacccaaagtgaagttcaagcggaagtcctga

SEQ ID NO: 75 - DNA, 513 bp, Artificial Sequence
  Synthetic
atggaacctgaggtgctgcagaaccctccttggtacatcgagcccaaagagggcgagagcatcagccactacttcggcagattcagacggcacgaggccgtgtgtgttagctctcctggcacactgtctaaggccgttggcatcggacctgtgctggccagatgggagaagttccggttcaacccatttcctagccagaaagagctggaagccatcggcaagctgatcggcctggacgccgatagaattgcccagatgctgcctagcaagggcgagaagatgaagctggaacctatccggctgtgcgccgtgtgttatgccgaacaggcctaccacagactggaatggcagttccagagcaccgtgggctgcgacagacacaagctgagactgctgagcgagtgccccttctgcaaagagagattcgctatccccgctctgtgggagcagggcgagtgtaacaagtgtcacaccccattccggtccatgaagaagcggcagaaggcctactga

SEQ ID NO: 76 - DNA, 500 bp, Artificial Sequence
  Synthetic
tcaaaatggtaatcaagaaactttagatagcactgcaactgtagaaatgaaacctggagatgtatttgtgatagaaactccaggcggaggaggatttttttaagagttttgaggagtaagatttgagtaatgaaaatatagtttttccaaaactcaatttatactattgttatcgttaaaaataacgataattatttgacttccatatggtgtccattaaataattattgtccattttaaagaattattgtccattttcaatttatagcgcttatagctgaaacctattcatagcaaggggttcagctattttgtttttagattattcttttcctatttttaaatcaaatgatgtcataaatcatataaaattttaaagtaaatgatgacatattttttggagatgagctgatgcccaggaagcctacgagcgaagcctttccaggattagagattgaggaagcggcaaatcaggaagaagagcaaacaaagcacctact

SEQ ID NO: 77 - DNA, 500 bp, Artificial Sequence
  Synthetic
gtttcaataaccctcacggctggtggtgggttgaaagattttatcgctatgttttcagcaatttcactattatgtcttctattgtaaaattatttattagggtggtttgaaaggagcacttcaatggcatattgccaaaacctgtgcagttgatcccatagatctctagatacatttagagtcaatgtatcttgcgagaaacttaacttaattttggacaataattatttaaaactggtttcaactctggacaataattatttaaaactggtttgagtgctgaaagtcaagaaaataggttacttatgtcccttaactacgtcaaaatggacaagaattctttaaaactgacaataataatttaatgtacatatggagttaagcggattcgaaccgctggccccttcaatgccattgaagtgctctaccaactgagctataaccccggaatacgcgtttctaattatcgctgaataatattatctttgtcaagattggta

SEQ ID NO: 78 - DNA, 1275 bp, Artificial Sequence
  Synthetic
atgaccgtgtaccggatcctgcagcctctgatcgacaaggtggaaaaggccaagagcatcagaagccccggctggcgaggaagcagactgagcatcaagaccagagatggcaacgatctgcaggtcgagcacagcaatcaagtgtggcagtgcgatcacaccctggtggatgtgctgctggtggacagacacggcaagctgctgtctagaccttggctgaccaccgtgatcgacagctacagcagatgcatcatgggcatcaacctgggctacgacgcccctagctctaaggttgtggctctggccctgagacacgccatcctgcctaagcagtacggcagcgactacggcctgaatgaggaatggggcacatctggcctgcctcagcacttctataccgacggcggcaaggacttcagatccaaccatctgcagcagatcggcgtgcagctgggcttcgttagacacctgagagacagacctagcgaaggcggcagcgtggaaagacccttcaagaccctgaacaccgagctgttcagcaccctgcctggctacaccggcagcaatattcagcagaggcctgaggaagccgagaacgaggcttgtctgacactgcaccagctggaaaagatcctcgtgcggtacatcgtggacaactacaaccagcggatcgacgccagaatgggcgaccagaccagatttcagagatgggagagcggcctgatcgccgctcctgatctgctgtctgagagagagctggacatctgcctgatgaagcagaccagacggcacatccagagaggcggctacctgcagttcgagaacctgatgtaccggggcgagaatctggccggatatgccggcgaaaaggtggtgctgagatacgaccccagagacatcaccaccatcatgatctactgcaccgagggcgacaaagaggtgttcctgaccagagcctacgctcaggacctggaaaccgaggaactgagcctggatgaggccaaggccagcagcagaaaagtgcgcgaagctggacaggccgtgaacaacagatccatcctggccgaagtgcgggaaagagaagtgttccctacacagaaaaagaccaagaaagagcggcagaagctggaacagaccgagctgaagaagtccaagcagcccattcctatcgagccagaggaactggacgaagccgtgtccaccgaggtggaaacagagcctgagatgcccgaggtgttcgactacgagcagatgagagaagattacggctggtga

SEQ ID NO: 79 - DNA, 849 bp, Artificial Sequence
  Synthetic
atgagcagcaaggccagcacaacagaggcccaggctattgctcagcagctgggagatatccccgccaacaacgagaagctgcaggccgagatccagcggctgaacagaaagggcttcgtgcccctggaacaagtgaaaaccctgcacgactggctggaaggcaagcggcagtctagacagtctggcagagttgtgggcgagagcagaaccggcaagaccatgggctgtgacgcctaccggctgagaaacaagcccaagcaagagagcggcaagcctcctacagtgcccgtggcctacatccagattcctcaagagtgcggcgccaaagaactgttcggcgtgatcatggaacacctgaagtaccaagtgaccaagggcaccgtggccgagattagagacagaaccctgcgggtgctgaaaggctgcggagtggaaatgctgatcatcgacgaggccgaccggttcaagcctaagacctttgccgaagtgcgggacatcttcgacaagctggaaatcgccgtgatcctcgtgggcaccgatagactggatgccgtgatcaagcgggacgaacaggtgtacaaccggttcagaagctgccacagattcggcaagatgtccggcgaggacttcaagcggaccgtggaaatctgggagaagcagatcctgaagctgcctgtggccagcaacctgggcagcaagacaatgctgaaaacactgggcgaagccaccggcggctatatcggactgctggacatgatcctgagagagagcgccatcagagccctgaagaagggcctgcagaagatcgacctggacaccctgaaagaagtgaccgccgagtaccggtga

SEQ ID NO: 80 - DNA, 507 bp, Artificial Sequence
  Synthetic
atgatggaagccgaggaaatcaaaccctggctgttccaagtggaacccctggaaggcgagagcatcagccactttctgggcagattccggctggccaacgatctgacaccttctggactgggacaagccgctggactcggcggagctattgccagatgggagaagttccggttcaaccctccacctagccggcagcagctggaatctctggctgtggtcgtgggcgtcgacaccgacagactggaaaagatgcttcctcctgccggcgtgggcatgaagatggaacctatcagactgtgcggcgcctgctacggcgaaagcccttgtcacaagatcgagtggcagttcaaagaaaccggcggctgcggcagacacaatctgacactgctgagcgagtgccccaattgcggcgccagattcaaagtgcctgctctgtgggtggacggctggtgccacagatgctttacccctttcgccgagatggtggaacaccagaagcggatctga

SEQ ID NO: 81 - DNA, 500 bp, Artificial Sequence
  Synthetic
gattcgacctgatttggagtaaaatgaaacaaattgaagtttgactcgttgaggctgggtgctgcttctggagccgaaaacgagggaatattaatgtacattaactaattatttgtcaatttaacaaaataattgtcatattattcaaaatcactcaatccctgtcattgcaataactatgacagggattttgttattacaaccagtcacagcgctttcagctttgattcacaaattagatgtcaaaatccagaattttcacaatttaattgtcacttctcaaaaatagtagacaatcatgattttgcataaattaacacattaattgtcacattattagtataatacaactatgttttgataaagcactgtatgcaggatgcagaattttctacaacttctacgacaaaggtaagttgcacagatgttaatagcactgaagcaaacattattgtttccgaactttcggatgaagctttgttgaaaatggaggtaattca

SEQ ID NO: 82 - DNA, 500 bp, Artificial Sequence
  Synthetic
gtttcaatgcccctcctagcttgaggcggaaagacctcttggcgatgcgattgcctttaatttggcagtttcaagtaaatagttggttaaaatatttaaggtgggttgaaaggtaaggcagaggtctgccattaaaaaatgccacatgcatgaggcagtgacatttattttgttaacattgacatcaatctgttagaaatgacattaatttgttaacagtgacaaataattagttaatgtacaacaaacaaaggcgacacccggatttgaaccgggggatggaggttttgcagacctctgccttaccacttggctatgtcgccacaactaacaattacatatattagcaccatttcgaatattattccacttttttcagcaacaggttaattttaccaccagtaatacgactatcagggcataaaccaagccatgaggtaaaatgcttgactgtagcaatgccttcgccagatttctgagtgatgacgtagtatcaaagc

SEQ ID NO: 83 - DNA, 1746 bp, Artificial Sequence
  Synthetic
atgtaccagcagctgcaggatagctaccccgccaatgatgatggcgccgtggaactgcagaagcaccagaacagcaccaagaccagcagcaagctgcccagcgagaagctgatcaccgacgacgtgaagctgcggatggaagtgatccagagcctgaccgagccttgcgacagaaagacctactccgagaagaagaaagaggccgccgagaaactgggcgtgaccatcagacaggtggaacggctgctgaagaagtggcgcgaggaaggacttgtcggcctggccacaacaagagccgacaagggcaagtaccggctggaacaagagtgggtcgacttcatcatcaacacctacaccaacggcaacaagaaaggcaagcagatgacccggcaccaggtgttcctcaaagtgaagggcgaagccaaagagaagggcctgaagaaaggcgagtaccccagccaccagagcatctacagaatcctggacaagcacatcgagggcaaagagcggaaggacaacgccagatctcctggctacagcggcgaaaagctgacccacatgacccgcgacggcagagaactggaagtggaaggcagcaacgacgtgtggcagtgcgatcacaccagactggacgtgatgctggtggacgagtacggcgtgctggatagaccttggctgaccatcgtgatcgacagctacagcagatgcgtgatgggcttctacctgggcttcgatcaccccagcagccagattgatgccctggctctgcaccacgccatcctgcctaagagctacagctccgagtacaccctgagacacgagtgggttgcctacggcaagcccaactacttctacaccgacggcggcaaggacttcacctccatccacaccacagaacaggtggccgtgcagatcggctttagctgtgccctgagaagaaggcctagcgacggcggaatcgtggaacggttcttcaagaccctgaacgaacaggtgctgaacaccctgccaggctacaccggctctaatgtgcagcagaggcccgagaacgtggacaagaatgcctgtctgaccctgaaaaacctggaaatggtgctcgtgcggtacatcgtggatgagtacaaccagcacaccgacgccagaatgaaggaccagagcagaatcggcagatgggaggccggctctatggtggaaccctacctgtacaacgagctggacctggccatctgcctgatgaagcaagagcggcggaaggtgcagaagtacggctgcatccagttcgagaacctgacctacagagccgaccacctgagaggcagagatggggaaacagtggccctgagatacgaccccgccgatgtgacaacactgctggtgtatgagatcaacgccgacggcaccgaggaatttctggactatgcccacgctcagagcctggaaacagagcacctgagcctgagagagctgaaggccatcaacaagcggctgaaagaagccagcgaggaaatcaacaacgacagcatcctggaagccatgctggacagacaggccttcgtggaacagaccgtgaagcagaaccggaagcagagaaggcaggccgccagcgagcaagtgaatcctgtggaacccgtggccaagaaattcgccgtgcctgagcctaaagaggtggaaaccgacagcgagcccgacatggaactgcccaattacgaagtgcgctacatggacgagttcttcgaggaagattga

SEQ ID NO: 84 - DNA, 828 bp, Artificial Sequence
  Synthetic
atgaccgatgccaagcctctggacttcatccaagagcctaccagagagattcaggcccacatcgagagactgagcagagccccttacctggaactgaatcaagtgaagtcctgccacacctggatgtacgagctggtcatcagcagaatgaccggcctgctcgtgggcgagtctagatctggcaagaccgtgacctgcaaggccttccggaacaactacaacaacctgcggcagggccaagagcagagaatcaagcccgtggtgtatatccagatcagcaagaactgcggcagccgcgagctgttcgtgaagattctgaaggccctgaacaagcccagcaacggcacaatcgccgacctgagagagagaaccctggacagcctggaaatccaccaggtggaaatgctgatcatcgacgaggccaaccacctgaagatcgagacattcagcgacgtgcggcacatctacgacgaggactccctgaagattagcgtgctgcttgtgggcaccacctccagactgctggccgtggttaagagggatgagcaggtcgtgaaccgcttcctggaaaagttcgagatcgacaagctggaagagaaccagttcaagcagatgatccaagtgtgggagcgcgacgtgctgagactgcctgaggaatctaaactggccagcggcgagagcttcaagctgctgaagcagagcaccaacaagctgatcggccggctggacatgatcctgagaaaggccgccatcagaagcctgctgcggggctacaagaaagtggatcagggcgtgctgaaagagatcatcaccgccaccaagttctga

SEQ ID NO: 85 - DNA, 522 bp, Artificial Sequence
  Synthetic
atgcgcgagagcatcaacgagaacaagcagttctggctgatcagagtggaacccctggaaggcgagtccatcagccactttctgggcagattcagaagagagaagggcaacaagttcagcgcccctagcggactgggagatgttgctggacttggagccgtgctggccagatgggagaagttctacttcaacccatttccgacgcaccaagagctggaagccctggcctctgtggtgcaagtggatgtggaccggctgagacagatgttgcctcctctgggcgtgtccatgaagcacagccctatcagactgtgcggcgcctgttatgccgagtctccctgtcacaagatcgagtggcagttcaagaaaaccgtgggctgcgaccggcaccagctgagactgctgtctaagtgtcccgtgtgcgagaagccctttcctgtgcctgctctgtgggtggacggcatctgcaacagatgcttcacccctttcgccgagatggcccagtaccagaagcactactga

SEQ ID NO: 86 - DNA, 500 bp, Artificial Sequence
  Synthetic
atgtctacttgtggtaaaaatagtgtttttgcttgccactaacacagaaaaataaaggaagcaatatgtataaattattacaagctgtacattcacatattagatgtcgctatttaacaaattaatgtcgcaagctttaaagcataaaaccctttccccgtaaggattttatagatttatatgattgtataaaagtgactagagatttttcatggttttcacaaattgaggtcgcaaacccgataatttcacaatttaagagtcgtttattttcttcagccagacaacctaacgttaaacggcttcacgaattagatgtcgcattcctgagagtggcaatatatttacttactctaaaagataaaacctgattaatggcagtatggctgcatcagtgctggaaaattaactgtcttatcctatttcagtgtataactaaaaaaattagctactaatcttacataacgaggtttcagttgtggcgtttcaacctgaagaca

SEQ ID NO: 87 - DNA, 565 bp, Artificial Sequence
  Synthetic
taattatgtatgtattcatctccattaggatgggtgagagtgataataaccattcacgaaagaatggattgaaaatgtaatacctaacgataaacagaaataggcaagttatataaatctttccggtgcaggactggttgaaatataaagattacaagatgtgggtatgggttgaaagggttcaaatccgtctgcttaacttttgctgccaagcatagtggttagaataattgtgtgcgaaataaagaacaaaagttttttgtttaaccaaggtatagcaaaagtttttagagcttgagctaaaattgagcttatggtcttctatttgataggactgatgttgaccaatcaccccacacaatcgattagtctcaaatattgcgacattaatttgtgaacggttatcttaaatgagccgcgacactaattagtgaaacagcgacattaatgtgtgaacggcgacatctaatgtgtgaatgtacaacaagctaagagcttctttcggtcggaggtttaacctaaagccagcagtcggatttgaaccgacgaccttccgattacaagt

SEQ ID NO: 88 - DNA, 1755 bp, Artificial Sequence
  Synthetic
atgaacagccagcagaaccccgatctggccgtgcatcctagcgccattcctatcgaaggactgctgggcgagagcgacatcaccctggaaaagaacgtgatcgccacacagctgagcgaggaagcccagctgaagctggaagtgatccagagcctgctggaaccctgcgacagaaccacatacggccagaagctgagagaggccgccgagaaactgggagtgtctctgagaaccgtgcagcggctggtcaagaactgggagcatgatggactcgtgggcctgacacagacaggcagagccgataagggcaagcacagaatcggcgagttctgggagaagttcatcaccaagacctacaacgagggcaacaagggcagcaagcggatgacccctaaacaggtggccctgagagtggaagccaaggccagagaactgaaggacagcaagcctcctaactacaagaccgtgctgagagtgctggcccctattctggaaaagcaagagaaggccaagagcatcagaagccctggctggcggggaacaaccctgagcgtgaaaaccagagagggcaaagacctgtccgtggactacagcaaccacgtgtggcagtgcgaccacaccagagtggatgtgctgctggtggatcagcacggcgagctgctttctagaccttggctgaccaccgtgatcgacacctacagcagatgcatcatgggcatcaacctgggcttcgacgccccttctagcggagttgttgctctggctctgcggcacgccattctgcctaagcagtacggcttcgagtacaagctgcactgcgagtggggcacctatggcaagcctgagcacttctacaccgacggcggcaaggacttcagaagcaaccacctgtctcagatcggcgcccagctcggctttgtgtgccacctgagagacagacctagcgaaggcggcgtggtggaaagacccttcaagaccctgaacgaccagctgttcagcaccctgcctggctacacaggcagcaacgtgcaagagaggcctaaggacgccgagaaggatgccagactgaccctgagagagctggaacagctgctgatccggtacatcgtggaccggtacaaccagagcatcgacgccagaatgggcgatcagaccagattcgagagatgggaggccggactgcctacagtgcctgtgcctattccagagcgcgacctggacatctgcctgatgaagcagagcagacggacagtgcagagaggcggctgtctgcagttccagaacctgatgtacagaggcgagtacctggccggctatgccggcgagacagtgaacctgagattcgaccccagagacatcaccaccatcctggtgtaccggcaagagaacaatcaagaggtgttcctgaccagggctcacgcccagggactcgaaacagaacaactggccctggatgaagccgaagccgctagcagaaggctgagaaacgccggcaagaccatcagcaatcagtccctgctgcaagaggtggtggacagagatgccctggtggccactaagaagtcccggaaagagcggcagaaactggaacaggctgtgctgagatctgccggcgtggacgagagcaagacagagtcactgtctagccaggtggtcgagcccgatgaggtggaaagcacagagacagtgcacagccagtacgaggacatggaagtgtgggactacgagcagctgcgggaagagtatggcttctga

SEQ ID NO: 89 - DNA, 831 bp, Artificial Sequence
  Synthetic
atgacagaggcccaggccattgccaaacagctcggcggagtgaagcccgacgatgaatggctgcaggccgagatcgctagactgaagggcaagagcatcgtgcccctgcagcaagtgaaaaccctgcacgattggctggacggcaagcggaaagccagacagagctgtagagtcgtgggcgagagcagaaccggaaagaccgtggcctgtgacgcctaccggtacagacagaaaccccagcaagaagtgggcagacctcctatcgtgcccgtggtgtatatccagcctcctcagaagtgcggcagcaaggacctgttcaaagagatgatcgagtacctgaagttccgggccaccaagggcaccgtgtccgatttcagaggcagagccatggaagtgctgaaaggctgcggcgtggaaatgctgatcatcgacgaggccgaccggctgaagcctgagacatttgctgaagtgcgggacatctacgacaagctgggaatcgccgtggtgctcgtgggcaccgatagactggaagccgtgatcaagcgggacgaacaggtgtacaaccggttcagagcctgccacagattcggcaagctgagcggcaaggacttccaggatacagtgcaggcctgggaagatcgggtgctgaagctgcctgtgtccagcaacctgacctccaaggacatgctgcggatcctgacaagcgccaccgagggctatatcggcagactggacgagatcctgagagagacagccatccgcagcctgagcaagggcttcaagaaaatcgacaaggccgtgctgcaagaggtggccaaagagtacaagtaa

SEQ ID NO: 90 - DNA, 501 bp, Artificial Sequence
  Synthetic
atgaccacacctgacgtgaagccctggctgttcatcatcgagccctatcctggcgagagcctgagccacttcctgggcagattcagacgggccaaccatctgtctccagccggacttggaggactggccggaattggagctgtggtggccagatgggagagattccacttcaaccccagacctagccagaaagagctggaagccattgccagcgtggtggaagtggatgcccagagactggctcagatgcttcctcctgctggcgtgggaatgcagcacgagcctattagactgtgcggcgcctgttatgccgaggctccttgtcacagaatcgagtggcagtacaagtccgtgtggaagtgcgaccggcaccagctgaagatcctggccaagtgtcccaactgtcaggcccctttcaagatgcccgctctgtgggaggatggctgctgccacagatgcagaacactgttcgccgagatggccaagcagcagaagtcctga

SEQ ID NO: 91 - DNA, 500 bp, Artificial Sequence
  Synthetic
cctttatcaccaaagtattcaatattttctcttaaccgaactttactgtttttaagtatgcaaaaattattgtacattaactaattatttgtcattgtacaaaaatgtacagtgactaattatatgtcgtcgagacaaattaatgtcatccattaaaatcttgctcggtataggttacagcgttttagtagtattaggataacatcttgacagtgacagattagctgtcattttgggtaatagtgacaaattagctgtcgcttcatcagagataaaaaagcttttgtgtattttcataatgacaaattgactgtcgctttctgtttaagtagaataacaatatgtttttataaaaaagcttcgcattatgaacagtcagcaaaatcctgatttagctgttcatccctcggcaattcctatagaaggcttactaggagaaagcgatataactcttgagaagaatgtaattgccacacaactctcagaggaagcccaactca

SEQ ID NO: 92 - DNA, 500 bp, Artificial Sequence
  Synthetic
gcaaatctgaaatcattacgcacgcatacaaaaatgttttaataacctgccaggtactaggtgggttatcataatttttattagggagggttgaaagagagcgctacgttgacattatcgctatagtctctgtaaataaatgacattaatctgtcactggcacctaaacgacatcaattcgtcccgacgacagttaattagtcccaacgacattaatctgtcaccgacgacaaataattagtcactgtacaaaaaaaatggacgtaactggattcgaaccagtgacctctacgatgtcaacgtagcgctctaaccaactgagctatacgtccttaaccacacgaatattgatagtagcatatacttttgcgatcgcacaagataaagacccaagctttttaagggggttttagattttgagtgcgtaaatcctaatttcaaataaaatccttattatttcgttacaatcagcttgtgcgttaagcattcaagagttatca

SEQ ID NO: 93 - DNA, 1677 bp, Artificial Sequence
  Synthetic
atgaacacattccccaacgagcagagcaacgccatcgtgctgaagaacaccatcgtgtccgacctgcctgagacagccagagccaagatggaagtgatccagacactgctggaaccctgcgacagaaccacctacggcgagagacttagagagggcgccaagaaactgggagtgtctgtgcggacagtgcagcggctgttcaagcagtaccaagagcaaggactggccgctctggtgtccatggaaagagccgataagggcaagcaccggatcaacgagttctggcaggacttcatcgtgaaaacctaccagcagggcaacaagggcagcaagcggatgacccctaaacaggtggccctgaaggtgcaggccaaggctctggaaatcggcgacgaacagcctcctacctatcggaccgtgctgagagtgctgaagcccatccaagagaagcaagaaaagaccaagtccatcagaagccccggctggcggggatctacactgagcgtgaaaacaagagatggcgacgacctggaaatcaactacagcaatcaagtgtggcagtgcgaccacaccagggccgatgttctgctggtggatagacacggcgagctgatcggtagaccttggctgaccaccgtgatcgacagctacagcagatgcatcatgggcatcaacctgggcttcgacgcccctagttctcaggttgtggcactggccctgaggcacgccattctgcctaagagatacggcgacgagtacaagctgcactgcgagtgggagacaagcggcacccctgagtacttctacaccgacggcggcaaggacttcagaagcaaccatctggcccagatcggcagccagctgggattcgtgcacaagctgagagacagacctagcgaaggcggcatcgtggaaagacccttcaagaccctgaaccagagcctgttcagcaccctgcctggctacacaggcagcaacgtgcaagagaggcctaaagaggccgagaaagaggccagcctgacactgagagagctggaacagctgatcgtgcggttcatcgtggacaagtacaaccagagcatcgacgcccggatgggcgaccagacaagataccagagatgggaggccggactgagaaggcagcctgagcctatcagcgagcgcgagctggatatctgcctgatgaaggccgctcggagaacagtgcagagaggcggctatctgcagttcgagaacgtgatgtaccggggcgagtacctggaaggctatgccggcgataccgtgatcctgagatacgagcccagagacatcaccaccatctgggtgtaccggcagaaaaagcaccaagaggtgttcctcaccagagcacatgcccaggatctggaaaccgagcagctgtctgtggacgaggccaaagcctctgccaaaaaactgagagatgccggcaagaccatcagcaaccagtccatcctgcaagaagtgatcgagagagaggccctggtcgagaagaagtcccggaagcagagacagaaggccgagcaggcctacaagcaagagaaacagcccagcatcatcgagacagtggaacccattgagcccgagcctctgacacagaccgaggtggacgatatcgaagtgtgggactacgaccagctgcgggacgattatggctggtga

SEQ ID NO: 94 - DNA, 831 bp, Artificial Sequence
  Synthetic
atgacacaggcccaagagatcgcccagaagctgggcgacctgaatcctgatgaacagtggctgcagatggaaatcgcccggctgaacagacagagcatcgtgcccctggaacacatcagggatctgcacgagtggctggacggcaagagaaaggccagacagtcctgtagactcgtgggcgagagcagaaccggaaagaccgtggcctgtgaagcctacacactgcggaacaagcccatccagcagggcagacagacacccattgtgcccgtggtgtacatcatgccacctaccaagtgcggcagcaaggacctgttcaaagagatcatcgagtacctgcggtacaaggccgtgaagggcaccgtgtccgagttcagatccagagccatggaagtgctgaagggctgcgaggtggaaatgatcatcatcgacgaggccgaccggctgaagcccgacacatttcctgatgtgcgggacatcaacgacaagctggaaatcagcgtggtgctcgtgggcaacgacagactggatgccgtgatcaagcgggacgaacaggtgtacaaccggttcagagcccacagaagattcggcaagctggccggcgtggaattcaagaaaacagtggccatctgggaagagaaggtgctgaagctgcccgtggccagcaatctgacaagcagcgccctgatcaagatcctggtcaaggccaccgagggctacatcggcagactggacgagattctgagagaggccgccatcaagagcctgatgaagggccacaagcggatcgagaaagaggtgctgcaagaggtcgccaaagagtacagctga

SEQ ID NO: 95 - DNA, 489 bp, Artificial Sequence
  Synthetic
atgaaggccaccgacgagatcaagccttggctgttcgccgtggaacctatcgagggcgagagcctgtctcacttcctgggcagagtgcggcggagaaaccacctgtctccatctgctctgggacagctggccggaatcggagccaaaattgccagatgggagcgcttccacctgaatccatttccaagcgacgccgacctgaaggccctgggagaaatcgttggagtggaaggcaagcggctgcggcttatgttgcctcctaagggcgaaagaatgatgttcgaccccatcagactgtgcggcgcctgttatggcgaagtgccctgtcacaagatcgagtggcagttcaagagcgtttggagatgcgagaagcacagcctgaagctgctgagcaagtgccccaactgccggaagaagttcaagatccccgctctgtgggagttcggcgagtgcgatagatgccggctgagcttccaagagatccggtga

SEQ ID NO: 96 - DNA, 500 bp, Artificial Sequence
  Synthetic
tctcctaaattcgttaacttaatctatatatcctaacttactcaaaaagtcatttaactcccctaaagtctcctctcgctgcgcttccaactcctgtacagtgacacattgtttgtcatcggtgacagattagtgtcgtcttttaaagaccttactcaataaggcttacgtccattttacactcatttgtactatttttgtttggtgacaaaataagtgtcgctttttgcttttatgacaaattaattgtcgttttttcataaagcttcaaaaataattgtgacaaattccatgtcactttttctataaatgtctgctaaaataacattatggtttttaaaatagtgttctaattatgagatgaatacttttcctaatgagcagtctaatgcaattgtactaaaaaataccattgtatcggatttgccagaaacggcacgggctaaaatggaggtcatccagacacttctagaaccctgcgatcgcacaacttacggaga

SEQ ID NO: 97 - DNA, 500 bp, Artificial Sequence
  Synthetic
gtttcaacgaccattcccaacaggggtgggtgaaatatagtctcaatattttcaatgttaagatggattgaaaggcgcacttcgttcgggaacatactatcgaagtattaaagataaatgccaatgctcagatcatgacaattaatttgtcaccagtgcttaaacgacagcaatttgtcacaaagacagttaatttgtctccacgacactaatctgtcaccgatgacaaataatatgtcactgtacaaatcgggatgacaggatttgaacctgcggccccttcgtcccgaacgaagtgcgctaccaagctgcgctacatcccgtaaaattaaacagcatttctattatagcacgatcgcccctaagactctatcccctcgcaaactttaatgaactgccgatcaagagcccctacccagaatgataagctaacagatggactaaaattcgtcagtaagctactatgactcaaggtaataataccccctatttactccgtg

SEQ ID NO: 98 - DNA, 1887 bp, Artificial Sequence
  Synthetic
atgtccgtgtttgccctgatggccgacaagaagttcgagctgaccgagaagttcacccagctgcctgaggccgtgtttctgggcgagaacaacttcgtgatcgaccccagccagatcatcctggaaaccagcgacaagcacaagctgaccttcaacctgatgcagtggctggccgagtctcccaacagaaccatcaagagccagcggaagcaggccattgcctctacactgggcgtgtccaccagacaggtggaaagactgctgaagcagtacgacgaggaccggctgtctgagacatctggcctgcagagaagcgacaagggcaagtacagagtgtccgactactggcaagagttcatcaagaccacctacgagaagtccctgaaggacaagcaccctatcagccccgcctctatcgtgcgggaagtgaagagacacgccatcgtggacctgaagctggaacagggcaactaccctcatcctgccaccgtgtaccggatcctgaatcctctgatcgagcagcaagagcggaagaaaaaagtgcggaaccctggcagcggcagctggatgacagtggaaacaagagatggcaagcagctgaaggtggacttcagcaaccagatcattcagtgcgaccacaccaagctggacatccggatcgtggatagcgacggcatcctgctgaccgaaagaccttggctgaccaccgtggtggataccttctccagctgcgtgaacggctttcacctgtggatcaagcagcctggctctgccgaagtggctatcgccctgagacatgccatcctgcctaagcagtaccccgacgattacgagctgggcaagccctggaagatctacggacaccccttccagtactttttcaccgacggcggcaaggacttcagatccaagcacctgaaagccatcggcaagaaactgggcttccagtgcgagctgagagacagacctatccaaggcggcatcgtggaacggatcttcaacaccatcaacacccaggtgctgaaggacctgcctggctacacaggccccaatgtgcaagagaggcctgagaacgccgagaaagaggcctgtctgtccatccacgacctggacaagatcctggccagcttcttctgcgacatctacaaccacgagccttatcctaaggacacccggatcaccagattcgagcggtggttcaaaggcatgggagagaagctgcccgagcctctgaatgagagagagctggatatctgcctgatgaaggaagctcagagagtcgttcaggcccacggcagcatccagttcgagaacctggtgtacagaggcgagagcctgaatgcccacaagggcgagtatgtgaccctgagatacgaccccgaccacatcctgacactgtacgtgtacagctacgacgtgaacgacgagctggaaaacttcctgggctacgtgcacgccatcaacatggacacacaggacctgagcctggaagaactgaagtctctgaacaaagagcggagcaaggccagaagagagcacagcaattacgacgccctgctggccctgagcaagcggaaagaactggtggaagagagaaagcagggcaagaaagagaagcggcaggccgagcagaagagactgagagccgccagcaagaaaaacagcaacgtggtggaactgcggcagaacagagccagcagcagctccaacaaggacgagaaggatgagaagatcgaactgctgccagagcgggtgtcccgcgaggaactgaaagtggaaaagatcgagcctcagctggaaatcctggataaggccgagacacctcctcaagagcggcacaagctcgtgatcagcagcagaaagcagcacctcaaaaagatctggtga

SEQ ID NO: 99 - DNA, 852 bp, Artificial Sequence
  Synthetic
atggccagatctcagctggccatccagagcagcgtggaagtgctggttcctcagctggacctgaatgcccagctggctaaggtggtggaagtggaagagatcttcagcaactacttcatccccaccgacagaagcagcgagtacctgagatggctggacgagctgcggatcctgagacagtgtggcagagtgatcggccccagagatgtgggcaagtctagagccagcctgcactaccagggccaagaccagaaacggatcagctacgtcagagcttggagcgccagcagcagcaagagactgttcagccagatcctgaaggacatcaagcacgccgctcctatgggcaagcgcgacgatcttagacctagactggccggctctctggaagtgttcggcttcgagcaagtgatcatcgacaacgccgagaacctgcagaaagaggccctgctggatctgaagcagctgttcgacgagtgccacgtgccaatcgtgctgatcggaggccaagagctggacaccatcctggacgagttcgacctgctgacctgctttcccacactgtacgagtttgacggcctggatgagaacgacttcaagaaaaccctgaacaccatcgagttcgatatcctggctctgcccgaggccagcaatctgtctgagggcatcatcttcgagctgctggccgagtctacaggcgccagaattggcctgctggtcaagatcctgacaaaggccgtgctgcacagcctgaagaacggcttctccaagatcgaccagaacatcctggaaaagatcgccaacagatacggcagacggtacatccctcctgagaagcggaacaacaagtga

SEQ ID NO: 100 - DNA, 567 bp, Artificial Sequence
  Synthetic
atggccgaggacatctacctgcctaagagagagatcatcagcaacaaagagatcaacaagggcgacgagatcctgcctagactgggcttcgtggaaccctacgagtgcgagagcatcagccactacctgggcagagtgcggagattcaaggccaacagcctgcctagcggctacagcctgggaaagatcgccggaattggcgccgtgaccaccagatgggagaagctgtacctgaatccatttcctagcgagacagagctggaagccctggccaaagtgatcgaggtggaagtggaacggctgcggcaaatgctgcctcctaagggcatgaccatgaagcccagacctatcagactgtgcgccgcctgttatgccgagtctccccaccacagaatcgagtggcagttcaaggacgtgatggtctgcgacagacaccagctgcctctgagcaccaagtgcaagaattgcggcaccccttttccaatacctgccgattgggttcgaggcgagtgccctcactgctgcctgagctttaccaagatggccaagcggcagaagtccggctaa

SEQ ID NO: 101 - DNA, 500 bp, Artificial Sequence
  Synthetic
aattgcagtgggatgagagggttctagatagctgataggagttacaggataccactgtttagtccaggaaaagttagtcatcatcaaattaactaatttattcgactcaaatttgaaaaatgagtaaaaagcggcatttaatgtgcgaatgttgtacattcgcacattatatgtcgcttttcgcaagttaggtcgcaaccgcatttaactgctataaaccctattttacaaaggtttgatgctcttagcacatcaagcccacgaatttacttaattcgcatattccatgtcgcaaactaaatattcgcaaattgaatgtcgtttattaaaatttgtcacttcgcaaattgtttgtcgtattattgagcgattcatggtacattggtactctaatgagtgtttttgctctaatggcagacaaaaaatttgaattgacagaaaaatttacacaacttcctgaagctgtttttcttggcgagaataatttcgtaatagatcca

SEQ ID NO: 102 - DNA, 500 bp, Artificial Sequence
  Synthetic
atcagactcttaatttaagtgatagagataatatttaagcacagatatatttcttactcagcaatagcatttagtatttgcatggaaataaatagctttgagacaacattaatttgttaacgatgtctttgaggatttaggggacatcaatttgttaaaaaagacattaattttgttaacgacgacaaattatttgtaatcgactttaggacaaataatttgtcgctttatgtactttgacaaataatgtgtcgctctacatcagttaatcgacaataaccaagcgacgttaatttgcgaaaacctataatcatcaatatagtacacaaatctgtcgaaagcgacactaatttgctaataacgacactaatgtgcgaaaagcgacatttaatgtgcgaaagtacaaatgtacaaaatgggcgacctggggctcgaacccagaaccagcagattaagagtctgatgctctaccattgagctagtcgccctcaccatttact

SEQ ID NO: 103 - DNA, 1662 bp, Artificial Sequence
  Synthetic
atggccaccgacaatcctaatgccagcggcatcgtgaccgagctgtctcacgaggccaagctgaagctggaaatcatcgagagcctgctggaaccctgcgacagacagacatacggcgagagactgaaggacgccgccaagaaactgggcaagtctgtgcggacagtgcagcggctggtgcagaaatgggaagccgaaggactgctggccctgaccggaacacagagagtggataagggcagacaccggatcagccaggactggcaggacttcatcatcaagacctaccgcgacggcaacaagggcagcaagcggatgagcagaaaacaggtggccctgagagtggaagtgcgggccaaagaactgggcgacgaggactaccccaactaccggacagtgtacagagtgctgcagcccctgattgaggcccaagaacagaaaaaaggcgtgcggacacctggctggcgaggctctcaactgagcgtgaaaaccagaaccggcgacgacatcagcgtggaatactccaaccacgtgtggcagtgcgaccacacatgggttgacgtgctggtggtggatatcgagggcgagatcatcggcagaccttggctgaccaccgtgatcgacacctacagcagatgcatcctgggcatcagagtgggcttcgatgcccctagttctcagctggttgccctggctctgagacacgccatgctgcccaagaattacggcaccgagtacgagctgcactgccagtggggcacatatggcaagcccgagtacctgtttaccgacggcggcaaggacttcagaagcgagcacctgaagcagatcggcgtgcagctgggcttcacctgtatcctgagagacagacctagcgaaggcggcgtggtggaaagacctttcggcaccctgaacaccgaactgtttgccggcctgcctggctacgtgggctctaacgttcagcagaggcctgagcaggccgagaaagaggcttgtctgaccctgcctgagctggaaaagcggatcgtgcggtacatcgtggacaactacaaccagcggatcgacaagagaatgggcgaccagaccagataccagagatgggaggctggcctgctggccacacctgatctgatcggagagagagatctggacatctgcctgatgaagcagaccaaccggtccatctacagagagggctacatcagattcgagaacctcatgtaccagggcgaacacctggccggatatgccggcgaaagagtggtgctgagatacgaccccagagacatcacctctgtgctggtgtaccagcctcagaaagacaaagaggtgttcctggccagagcctacgccacaggactggaagctgaacaggtgtccctcgaggaagtgaaggccagcaaccagaagatcagagagaagggcaagaccatcagcaaccacagcatcctggaagaagtccgcgaccgggatatcttcgtggccaagaaaaagaccaagaaagagcgccagaaagaggaacagaagcagctgcacagcgccgtgtccaagtctcagcctgtggaagtggaacccgagcctgagatcgaggatacccctgtgcctaagaaaaagccccgggtgctgaactacgatcagctgaaagaggactacggctggtaa

SEQ ID NO: 104 - DNA, 837 bp, Artificial Sequence
  Synthetic
atggccgagaacaaggcccagtctgtggctgagcagctgggcgagatcaagagcctggatgccaaactgcaggccgagatcgagagactgagaggcaagaccctgctggaactggaacaggtgtccaagctgcacgactggctggaaggcaagcggagaagcagacagagctgtagagtcgtgggcgagagcagaaccggaaagaccgtggcctgcgacagctacagactgagacacagacccatccaagaagtgggcaagcctcctatcgtgcccgtggtgtatatccagcctcctcaagagtgtagcagcggcgagctgttcagagtgatcatcgagcacctgaagtacaacatggtcaagggcaccgtgggcgaaatccgcagcagaacactgcaggtcctgaagagatgcggcgtggaaatgctgatcattgacgaggccgaccggctgaagcctaagacctttgctgacgtgcgggacatcttcgacaacctgggcatctctgtggtgctcgtgggcaccgatagactggacaccgtgatcaagcgggacgagcaggtctacaaccggttcagagccagctaccacttcggccagctgaagggcaacaagttcaaagagacagtcgagatctgggagcaagacgtgctgagactgcccgtgcctagcaacctgggaagcaagcccatgctgaagatcctgggagaagccaccggcggctatatcggcctgatggacatgatcctgagagaggccggaatcagagccctcgagcagggcctgaccaagatcgacagagacaccctgaaagaggtggcccaagagtacaagtga

SEQ ID NO: 105 - DNA, 501 bp, Artificial Sequence
  Synthetic
atggacgagatccagccttggctgttcgctatcgctcctctggaaggcgagagcctgtctcacttcctgggcagattcagaagagagaacgacctgagcgcctccatgctgggaaaagaggccggaattggagccgtggtggccagatgggagaagttccacctgaatccatttccaagccggaaagagctggaagccctggccaaagtggtgcaggtcgacagcgatcggctgagagaaatgctgcctcctgaaggcgtgggcatgaagcacgagcctatcagactgtgcggcagctgctatgcccagtctccttgccacaagatcgagtggcagttcaagaccacacagagatgcgaccggcacaagctgacactgctgagcgagtgccctaactgcaaggccagattcaagatccccgctctgtgggccgatggctggtgccacagatgctttaccaccttcgccgagatgagcaagagccacaaagaactcgtgtga

SEQ ID NO: 106 - DNA, 500 bp, Artificial Sequence
  Synthetic
ccgtactgagtctattcgttgactcgagaggatctaaacgagatcaatttttcacaaagacacataatttgactccacaacaaataatgtgtcagtgtacatgtcgattgccaaattatatgtcgtcttgtcaaattaattgacatgataaattttaagcctgtaatcctcacgaatcatagattacaggctattttagcatctttcacttcattgaatactaattgacaaattaaatgtcttatcttgggaaattgacaaattaaatgtccaagtttggaaattaagatttttatcatctttgacagattgtttgtcattaccagtataattgtactatgttgcaattaaacagtaatgttggaatatggcgacagataaccctaatgcctctggaattgtgaccgaactctcgcatgaggcgaaactgaagctagaaattattgagagtttgctggaaccgtgcgatcgccaaacctacggggaacgtctcaaagatg

SEQ ID NO: 107 - DNA, 500 bp, Artificial Sequence
  Synthetic
tagatgcccagtcgccatttaatttgaagcctgggtttcaactaccatcccaactaggggtgggttgaaagttacctttaggcaagcaaatttttctaaagcgatcagttagacactctgaaaaattacaaatgataggatggattgaaaggagcatcggactcttaactttgtatgtaagattgcagctaattgtccaatggctgttagaaagagacgcttaatttgtcactgttatttaaaagacactaatttgtcaaaacgacattaatttgacaacgacgacaaataatgtggcaatcgacaacaagatgggtaaccaggggctcgaaccctgaaccaacggattaagagtccgatgctctaccattgagctagtcacccttagaaaaactattataacagattttaataaattaagtaaactatttactaaaaatttttgattaaccgatcgctaatttattcgggatactatacatatcatgctcccgatttgc

SEQ ID NO: 108 - DNA, 1797 bp, Artificial Sequence
  Synthetic
atgagccaggacagccagagattcttcagccctcacgagggcaacaagcccaccgagctgcagagaaccagcaagaaccctgccaagagccacagactgcctagcgacgagctgatcaccgatgaagtgcggctgcggatggaaatcatccagagactgaccgagccttgcgacagaaagacctacggcatccggaagagagaggccgccgaaaagctgggagtgaccctgagatccatcgagcggctgctgaagaagtaccaagagcagggactcgtgggcctgacacagaccagatctgacaagggccagagaagaatcagcgccgactggcaagagttcatcgtcaagacctacaaagagggaaacaagggcagcaagcggatgctgcggaaccaggtgttcctgagagtgaagggcagagccaagcagctgggcctgaagcctgaggaataccctagccaccagaccgtgtaccggatcctggacgagtacatcgagggcaaagagcggaagcggaacgccagatctcctggctatctgggcagcagactgacccacatgaccagagatggccaagagctggaagtggaaggcagcaacgatgtgtggcagtgcgaccacaccagactggacatcagaatcgtggatgagtacggcgtgctggacagaccttggctgaccgtgatcatcgacagctacagcagatgcctgatgggcttcttcctgggctttttcgcccctagcagccagatcgatgccctggctctgagacacgccatcctgcctaagttctacggcagcgagtatggcctgggcgacaaagagtttggcacctacggaatccccagctacttctacaccgacggcggcaacgacttccagagcatccacatcacagaacaggtggccgtgcagctgggattctcttgtgccctgagaagaaggccaagcgacggcggaattgtggaacggttcttcaagaccctgaacgaccaggtgctgagaaacctgcctggctacaccggctccaatgtgcaagaaagacccgacgacgtggacaaggacgcctgtctgacactgaaggacctggatatcatcctcgtgcggtacatggtcaaagagtacaacggccacaccgacgccagattcatcgtgaaagagtataacgccgacgacaccgacgtgaagctgaacgcccagacacggttcatgagatgggaggccggactgatgatcgagcctcctctgtacgatgagctggacctcgtgatcgccctgatgaaggccgagagaaggaccgtgggcaaatacggcaccctgcagtttgagagcctgacctacagagccgagcacctgagaggcagagaaggcaaagtggtggccctgagatacgaccccgacgacatcaccaccatcttcgtgtatcagatccacgaggacggcaccgaggaatttctggactacgcccatgctcagggcctcgaggtggaaagactgagcctgagagagctgcaggccatcaagaagcggctgagagaagcccgggaagagatcaacagcgagacaatccaggccatgctggaacgggaagagtggaccgaggaaaccatcaagcggaaccggcagcagcggagaaaagccgctcacgagctggtcaatcctgtgcagagcgtggccgagaagttcggcatcgtggaacctcaagaggccgactctgaggccgaggaagaactggaagccgagctgcctagatacaaggtgcagtacatggacgagctgttcgacgacgactga

SEQ ID NO: 109 - DNA, 723 bp, Artificial Sequence
  Synthetic
atgccctaccacatctggatgtacgagctgctgctgagcagaatgaccggcctgctgctgggcgagtctagatctggcaagaccgtgacctgcaagaccttcaccaaccggtgcaaccagcaggccaagaccaaggacaagcgcgtgatgcccgtgatctacattcagatccccaagaactgcggcagccgggacctgttcatcaagatcctgaaagccctgggccacagagccaccagcggcacaattaccgacctgagagagagaaccctggacaccctggaactgtttcaggtgcagatgctgatcatcgacgaggccaaccacctgaagctggaaacctttagcgacgtgcggcacatctacgacgacgacaatctgggcctgagcgtgctgctcgtgggcaccacaaatagactgaccagagtggtggaacgggacgaacaggtggaaaaccggttcctggaaagataccagctggacaagatcaacgacaaagagttccagcagctggccaaaatctgggtgcaagacgtgctgggcatgagcgaggccagcaatctgatcaagggcgagacactgcggctgctgaagaaaaccaccaagcggctgatcggccggctggacatgattctgagaaaggccgccatcagaagcctgctgaagggctacgaaaccctggatgccgaggtgctgaaacaggtggccaagagcgtgaagtga

SEQ ID NO: 110 - DNA, 546 bp, Artificial Sequence
  Synthetic
atggacgagctggaaacccagctgtggctgaacagagtggaaccctacgagggcgagagcatcagccactttctgggcagatttcggagagccaagggcaacaagttcagcgccccttctggcctgggaaaagtggcaggactgggcgtcgtgctcgtcagatgggagaagctgtacctgaatccatttccaaccaggcagcagctggaagccctggccgatgtggttatggtggacgccgatagactggcccagatgctgcctcctaagggcgtgaccatgaagcccagacctatcctgctgtgcgccgtgtgctatgccgagaatccctaccacagaatcgagtggcagttcaaagagagatggggctgcgacggcagaagcgccaatagactgagacacagacaccagctgcctctgctgggcaagtgcatcaactgcgagacaccctttcctatacctgctctgtgggtggaaggcgagtgccctcactgctttctgccctttgccagaatggccaagcggcagaagtccagaagggcctaa

SEQ ID NO: 111 - DNA, 500 bp, Artificial Sequence
  Synthetic
tactatacaaatacgttaaggtattaatctcccaaaagacacactataaaaaagacttctcagcgactgaacgctagaagccttccgttgatttattcttgtacattcacaaattaaatgtcgttatttaacaaattaatgtcgtagaaagattagcgcgtaatctacattctacaagggtttcagtgactttcaatcttaactaaggtgaacgtccgcatttaacattttatacgtcgcaatttagtacctttaacaatttatatgtcggttattggctaaaacttcaatttgaatcttaactagacttcacaaattgtttgtcgcattttagggcaagccagactatcatttggacagcggttagtacattggttctgtttgttgcttactgctcactctattatgtggaactctcgcatcacgtatgtaggtgaagaatgtctcaggattcacaacgttttttttctccgcatgaaggtaataagccaactgaactt

SEQ ID NO: 112 - DNA, 500 bp, Artificial Sequence
  Synthetic
ttcatcacccctcccgccttgggatgggttgaaagtctgtgttaccttatttcctggaatttgtagggaaggttgaaaggcgcacttcgttcgggattattctgataggattaaatattctcaacacaatgagagggtaactttcttacttcattttccacgttcagaagtttagcgacaataatttgttaacagttgcctagaagcaaagtcgccgtaacagcgacgtgaatttgttaaaaacgacatcaatctgttaatagcgacatttaatttgtgaatgtacaacaattataatcgggatgacaggatttgaacctgcgaccccttcgtcccgaacgaagtgcgctaccaagctgcgctacatcccgataagttatagccgtaactcatctatggtatcacattgtatcggcaatcagccgccagcttgctaggataatcactgtaacttcagtgggagctgggctgggagtggtcgttaaaccagaatggttgcg

SEQ ID NO: 113 - DNA, 1710 bp, Artificial Sequence
  Synthetic
atgtacatgcggaacgagacacccctgacacctggcaacctgggagatgagagcagcatcggcaaagaaacccaggtgctggtgtctgagctgagcggagaggccaagctgaagatggaagtgatccagagcctgctggaagccggcgacagaacaacatacgcccagagactgaaagaggccgccgtcaagctgggaaagtctgtgcggacagtgcggcggctgatcgacaagtgggaagaagagggactcgtcggcctgacacagaccgagagagtggataagggcaagcacagagtggacgagaactggcaagagttcatcctcaagacctacaaagagggcaacaaaggcggcaagcggatgagcagacagcaggtcgccgtcagagtgaaagtgcgggctgatgatctgggcgtgaagcctcctagccacatgaccgtgtaccggatcctggaacctgtgatcgagaagcaagagaaggccaagagcatcagaagccccggctggcgaggaagcagactgagcgtcaagaccagagatggcaaggatctgcaggtcgagtacagcaatcaagtgtggcagtgcgaccacaccagagccgatgtgctgctggtggataagcacggcgagatccttggcagaccttggctgaccaccgtgatcgacagctacagcagatgcatcgtgggcatcaacctgggctacgatgcccctagttctcaggtggtggctctggccctgagacacgccattctgcctaagcagtacggccaagagtacgagctgtacgaggaatggggcacctacggcaagcccgagcacttttacacagacggcggcaaggacttcagaagcaaccatctgcagcagatcggcgtgcagctgggctttgcctgtcacctgagagacagacctagcgaaggcggcatcgtggaaagacccttcaagaccttcaacacccagctgttcagcacactgcagggctacaccggcagcaacgtgcaagaaagacctgaggaagccgagaaagaagcctgtctgaccctgagagagctggaacagagactggtggcctacatcgtgaacacctacaaccagcgcgaggacgccagaatgggcgatcagaccagatttcagagatgggacagcggcctgatcgtggcccctgaagtgatcagcgagagagatctggacatctgcctgatgaagcagagccggcggatgattcagagaggcggctacctgcagttcgagaacctgatgtacaagggcgagcacctggccggatatgccggcgaatctgtggtgctgagatacgaccccagagacatcaccaccatcctggtgtactcccacaagggccacaaagaggaatttctggccagggcctacgctcaggacctggaaacagaggaactgagcctggatgaggccaaggccatgatcagacggattagagaggccggcaagaccatcagcaaccggtctatgctggccgaagtgcgggacagagaaaccttcgtgaagcagaaaaagaccaagaaagagcggcagaaagaggaacaggccgtcgtccagaaaacaaaaaagcccgtgcctgtggaacccgtggaagagatcgaggtggccttcgtggaatccagccaagaaaccgacatgcccgaggtgttcgactacgagcagatgagagaagattacggctggtga

SEQ ID NO: 114 - DNA, 1593 bp, Artificial Sequence
  Synthetic
atggaactggtcgaggaagtgaacaagatcgtcggcatcaagaccaaagagacactgaccccaggccaggtggtcaaggccatgatcctgaatggcctgggctttctgagcgcccctctgtacctgttcggcgagttctttgtgggcaaagccaccgagcacctgatcggagaaggcgtgctgcccgaacacctgaacgatgacaagctgggcagagagctggacaagtaccaccagatcggcaccaccaagatcttcaccgccgtggccattaaggccgctcacaagttccaggtggaaatggacagcattcacctggacggcaccagcatgtctgtggaaggcgagtacaagaaagagatcaaagagattgacgagatcaagcaagagacagaggaaaacaagctggaaatcgagcccgagatgaaggccatcgagatcgtgcacggctacagcagagacaagaggcccgacctgaagcagttcatcatcgacatgatcgtgaccggcgacggcgacatcccactgtatctgaaagtggacagcggcaacgtggacgacaagagcgtgttcgtggaacggctgaaagaattcaagaagcagtggaccttcgagggcatcagcgtggccgatagcgctctgtacacagccgaaaatctggccgccatgcgcgagctgaagtggatcacaagagtgcccctgagcatcaaagaggccaagaacaagattgtggatatcaaagaagccgagtggaaggacagccagatcagcggctataagatcgccgccaaagagagcgagtacgccggaatcaagcagcggtggatcatcgtggaaagcgagatccggaagaagtccagcatccagcaggtcgagaagcaagtgaagaagcaagaagccaaggccaaggctgccctgagcaagctgagcagacaagagttcgcctgccagcctgacgccaagatcgtgatcgagaagctgtccaagtcctggaaatatcaccaaatcaaagaaatcgagtacattgagaagctcgagtataagaccgccggcagaccctccaagctgacagagcctagccagattaagtaccagatcaagggccagatcgagacacgggaagaagtgatcgaaaccgagaagatcaatgccggcagattcatcctggccaccaacgtgctggaccggaatgagctgtccgacgagaaggtgctggaagagtacaaggcccagcagagcaacgagcggggcttcagattcctgaaggaccctctgttcttcaccagctccgtgtttgtgaaaacccctgagagagtggaagccattgccatgattatgggcctgtgcctgctggtgtacaatctggcccagcggaagctgagacaagaactggccaagttcgacgacggcatccgcaatcaagtcaagaagatcaccaacaagcccaccatgagatgggtgttccagatgttccaggccgtgcacctggtcatcatcaacggccagaaacagatgagcaacctgaccgaggaacgcgagaagattgtgcgctacctgggcaagtcctgcagcaagtactacctgatcacctga

SEQ ID NO: 115 - DNA, 504 bp, Artificial Sequence
  Synthetic
atggaagtgggcgagatcaacccatggctgttccaggtggaaccctacctgggcgagagcctgtctcacttcctgggcagattcagacgggccaacgatctgaccacaaccggcctgggaaaagccgctggtgttggcggagccatcagcagatgggagaagttccggttcaaccctccacctagccggcagcaactggaagccctggccaaagtcgtgggagtcgatgccgatagactggaacagatgctgcctcctgctggcgtgggcatgaacctggaacctatcagactgtgcgccgcctgctacgtggaaagcccttgtcacagaatcgagtggcagttcaaagtgacccagggctgccagcaccaccacctgtctctgctgagcgagtgccctaattgcggcgccagattcaaggtgccagctctgtgggttgacggctggtgccagagatgcttcctgcctttcggcgagatgatcgagcaccagaagcggatctga

SEQ ID NO: 116 - DNA, 500 bp, Artificial Sequence
  Synthetic
tctaacgataacgaataatgataaataccgtagtgcaatattatgctacaggaaacttaatcagtgtttacataatttgtgtacattaactaattatttgacaatttaacaaaatattgtcaaaaatcataaaaataccttaaaaccttctacagcaaagattgtaggaggtttttatttatctaatttgtgaacatcctccagacatatatttaacaaattaagtgtcaaaagccagataattatcaatttatttgtcaatttgccaaatacaggtaaattactatatttctgaaaatttcacacattaaatgtcacttttactctatactatacaaatatgttgtaattaaacattaatgtatatgaggaatgaaacacctctaactccgggcaatttgggagatgaaagtagcatcggcaaagaaactcaagttcttgtgtcggaactttctggcgaggcaaaactaaaaatggaggttattcaaagtctgttagaa

SEQ ID NO: 117 - DNA, 500 bp, Artificial Sequence
  Synthetic
gtttcaacacccctcccggagtggggcgggttgaaagacattaatgcaagtagaataaaaaatatctaggtgggttgaaagatcagtaggtcgtgggtttaactctgaaaacacttgaaaacactatataaatacagtgttgcttgtgacatttagggacaattaatttgttaacagtgacacgaattagttaaaaatgacattaatttgttaacagtgacaaataaattgttaatgtacagacatatagtgtgcgaatgtacaccaaagccgatgatgggatttgaacccacgacctactgattacgaatcagttgctctacccctgagccacatcggcatacacagtttgatatcatagcattatttacctatgatagacccaaattcccaaaatcgtcttaactctaaacaatatgcccacctgaaagctgaaatagcagccccttatcgtggtttgcggcaatttatctatataggtgttggtgcttctggtttta

SEQ ID NO: 118 - DNA, 1749 bp, Artificial Sequence
  Synthetic
atgaaccgggacgagaacagcgacctgaacaccagcgccattccagtggaatccatcagcgagggcgacaacacccctcctgagacaaatgtgatcgccaccgagctgagcgaggaaagccagctgaaactggaagtgctgcagagcctgctggaaccctgcgacagaacaacctacggccagaagctgaaagaggccgccgagaaactggctgtgtctgtgcgaacagtgcagcggctggtcaagaagtgggagcaagacggactcgtgggcctgacacagaccggcagaacagataagggcaagcaccggatcggcgagttctgggaagatttcatcgtgaaaacccacaaagagggcaacaagggcagcaagcggatgagccctaaacaggtggccatcagagtgcaggccaaggctcacgagctgtccgatctgaagcctcctaactaccggaccgtgctgagagtgctggcccctatcctggaaaagcaagaaaagaccaagagcatcagaagccccggctggcggggaacaacactgagcgtgaaaacaagagaaggcaaggacctgagcgtggactacagcaaccacgtgtggcagtgcgatcacacccctgctgatgtgctgctggtggatcagcatggcgagctgctgtctagaccttggctgaccaccgtgatcgacacctacagcagatgcatcatgggcatcaacctgggcttcgacgcccctagctctgaagtggttgctctggccctgagacacgccatcctgcctaagagatacagcctcgagtacaagctgcactgcgagtggggcacatacggcaagcctgagcacttctacaccgacggcggcaaggacttcagaagcaaccacctgtctcagatcggcgctcagctgggctttgtgtgccacctgagagacagacctagcgaaggcggcatcgtggaaagacccttcaagaccctgaacgatcagctgttcagcaccctgcctggctacaccggcagcaatgtgcaagaaagacccgaggatgccgagaaggacgccaagctgacactgagagagctggaacagctcattgtgcggtacatcgtggaccggtacaaccagagcatcgacgccagaatgggcgaccagaccagattcggaagatgggaagccggcctgccttctgtgcctgtgcctatcgaggaacgcgacctggacatctgcctgatgaagcagtctcggcggagagtgcagaaaggcggccatctgcagttccagaacctgatgtaccggggcgagtacctcggcggctatgatggcgaaaccgtgaacctgcggttcaaccccagagacatcaccaccgtgctggtgtaccggcaagagaacagccaagaggtgttcctgaccagggctcatgcccagggactcgagacagaacagctgtccctggatgaagccgaggccgcatctcggagactgagaaatctgggcaagaccatcagcaatcaggccctgctgcaagaggtgctggacagagatgcactggtggccaacaagaagtcccggaaggacagacagaagctcgagcaagagatcctgagaagcaccgccgtgaacgacagcaagaacgagtctctggctagccccgtgatggaagctgaggacgtggaattcaccacacctgtgcagagcagcagccccgagctggaagtgtgggattacgagcagctgcgggaagagtacggcttctga

SEQ ID NO: 119 - DNA, 837 bp, Artificial Sequence
  Synthetic
atgaccgatgacgcccaggccattgccaaacagctcggcggagtgaagcccgacgaagaatggctgcaggccgagatcacacacctgaccagcaagagcatcgtgcccctgcagcaagtgatcaccctgcacgattggctggacggcaagagaaaggccagacagagctgtagagtcgtgggcgagagcagaaccggaaagaccgtggcctgtgacgcctaccggtacagacacaagcccagacaagagatgggcaagacccctatcgtgcccgtggtgtacatccagcctccatctaagtgcggcgccaaggacctgttccaagagatcatcgagtacctgaagttcaaggccaccagaggcaccatcagcgacttcagaggccggaccatggaagtgctgaagggctgcagagtggaaatgatcatcatcgacgaggccgaccggatcaagcccgatacctttgctgacgtgcgggacatctacgacaagctgggaatcgccatcgtgctcgtgggcaccgatagactggaagccgtgatcaagcgggacgaacaggtgtacaaccggttcagagcctgccacagattcggcaagctggccggcaaggacttccaggatacagtgcaggcctgggaagataagatcctgaagctgcccctgcctagcaacctgatctccaaggacatgctgcggatcctgacaagcgccaccgagggctatatcggcggactggatgagatcctgagagaggccgccatcagaagcctgtccagaggcctgaagaaaatcgacaaggccgtgctgcaagaggtggtgcaagagttcaagctgtga

SEQ ID NO: 120 - DNA, 480 bp, Artificial Sequence
  Synthetic
atgatccagccttacgagggcgagagcctgagccacttcctgggcagattcagaagggccaaccacctgtctgctgccggcctgggaaatctggctggaatcggagccgtgatcgccagatgggagagattccacttcaaccccagacctagccagaaagagctggaagccattgccagcgtggtggaagtggatgcccagagactggccgaaatgttgcctcctgctggcgtgtccatgcagcacgagcctattagactgtgcggcgcctgttacgccgagacaccttgtcaccagatcaagtggcagttcaaagagacaggcggctgcgaccggcactacctgagactgctgagcaagtgccctaactgcgacgccagattcaagatccccgctctgtgggagctgggcgtgtgtcagagatgcctgatgacctttgccgagatggccggctaccagaagtccatcaacggcacctaa

SEQ ID NO: 121 - DNA, 500 bp, Artificial Sequence
  Synthetic
tttaagtatagtagtattatcaagggtaaaaatgtcaacatttcataatatcttccatccaatgaacataactgatttgttgacacatacaagattgaagatagcggaatttatctaacatcttttcaccccattctttcggaacagataaatgtacagtgactaattatatgtcatcgtgacaaattaatgtcatcttataaatccttgctgtagaaggattttagcaatttaacgatattatacttcaatccagttagtgacaaaataaatgtcgtttcccatgattgtgacaaattaactgtcgcgttaccgattaaaaaaagtttttgtatattttcataatgacaaattgactgtcgctttccagtaagctagaataacatcatgtttttataaaatctgtttgatttatgaacagagatgaaaattctgatttaaatacctcagctatccctgtggaaagcatatcagaaggagacaacacacctcctgagaca

SEQ ID NO: 122 - DNA, 500 bp, Artificial Sequence
  Synthetic
ggtaacaacaacccaccctatggtgggttgaaaggttatcatattcttataaaaagagggttgaaagagagtacatcgttgacatatcgctctgatatatcaataaatgacattaatttgtcactaccattaaaacgacaacaatttgtcctaacgacactaaattgtcaccgacgacatataattagtcactgtacaaaaagtatggacggtattggactcgaaccaacgaccccatcgatgtcaacgatgtactctaaccacctgagctaaccgtccttaatcccatagactaataacgtatcacataaaatataatttgtcaatccctaaaatccaaattttattctacatatatctagtcaactgtacccgatagcgatccttttttgtcaccgcaatttccccaacttccaaccgaccttttccccgaatagcgattaaatcccctgttttcacttgagaactggcttgagtgacttccttccaattgacacgca

SEQ ID NO: 123 - DNA, 1665 bp, Artificial Sequence
  Synthetic
atgaccatcgacaaccagttcagcgacagccccgagctgattagccagctgtctcccgaggaccagaaaatcgccgacgtgatcgagaacctgctgcagccctgcgacaagaaaacctacggcaagaagctgaagcaggccagcgaccagctgaagaaaagcgtgcggaccatccagagatacgtgaagcagtgggaagagaacggcctcgtgggcatcctgcagaacaacagagccgacaagggcagctaccggatcgaccctagactgcaggacttcatcctcaagacctacagagagggcaacaagggctccaagcggatgacccctaaacaggtgtacctgagagccgtggtgcaggccgagaattggggaatcaagcctcctagccacatgaccatctaccggattctgaaccccatcattgccgagaaagagaacaagaagcggatcagaagcagcggctggcggggatctcaactggtgctgtctacaagatccggcaccgagatcgacgtgcagtacagcaatcacgtgtggcagtgcgaccacaccagagccgatatcctgctggtggatcagttcggcgaactcctgggcagaccctggatcaccattgtggtggacacctacagccggtgcatcatgggcatcaacctgggctttgatgcccctagcagccaggttgtgacactggccctgagacacgccatcctgcctaagagctacagcagcgactacgagctgcacgaggaatggggcacatacggcaagcccgagtacttctacaccgacggcggcaaggacttcagaagcaaccatctgcagcagatcagcctgcagctgggcttcacctgtcacctgagaagcagacctagcgaaggcggcgtggtggaaagactgttcaagaccctgaacacagaggtgttcagcaccctgcctggctacacaggcgccaatgtgcaagaaagacccgaggacgccgaaaaagaggcctgtctgaccctgaaagagctggaaatcctgatcgtgcggtacatcgtggacaactacaaccagcggatcgacgccagaatgggcgagcagaccagattccagagatgggagagcggcctgctgagcacccctcacattatccctgagcgcgagctggacatctgcctgatgaagcagtccagacggaaggtgcagaaaggcgggcatctgcagttcgagaatctgatctacaagggccagtacctggccggctatgagggcgagacagtgatcctgagatacgaccccagagacatcaccggcatcctgatctatcgcgtcgagaacaacaaagagatcttcctgaccagagcctacgccaccgacctggaaggcgattgtctgagcctgaccgatgccaagagcagcgtgaagagaatccgcgagaagtccaagaacgtgcacaacaagtccatcctgatggaaatccagcagcggcacctgttcagcgagaagaaaacaaagaagcagattcagcaagaggaacagaaacagatcaagcccaacaccagcctgagcatcttcaagcccgaaaccgagatggacacccaggtggaaagcagccaagagctgagcgaagaggacctggacatcgagatgatcgactacggcaacctgcagcagtactga

SEQ ID NO: 124 - DNA, 834 bp, Artificial Sequence
  Synthetic
atggaagccaaagagatcgcccagcagctgggagaagtggaacagcccaatcagagcctgcagaacgagctggaccggctgagcaagaagcagttcctgttcctggaccaagtgaagatctaccaccagtggctgaacgagcggctgttcatgaagcactgctgcagagtcgtgggcgatagccacacaggcaagacatctagcagccaggcctactgcctgcggtacaagagcacacaagagagcggcaagaaccctatcttccccgtgctgtacgtgtccgtgcctgagaatgccaccagcaaggtgttcttcgaaaccagcatcaagagcttcggctaccggatcagcaagggcaccatcagcgacctgcgggaaagaatgctgaccctgctgagccggtgccaagtgaaaatgatgatcattgacgaggccgaccggtgcaagcccgagacactgagctacatccgggacatcttcgaccacctgaacatctgcatcgtgctcgtgggcaccgacagactgaacaccgtgctgaagagggacgaacaggtgtacaaccggttcctgccttgctacagatacggcctgctggacaaagagagcctgatcaagaccatcaagatctgggagatcaagatcctgaagctgcccgtggccagcaatctgagccagggcaagaagttcaacatcatctacagcacctccaagggctgcctgggcaccatggataagctgctgagaaccagcgccagcatggccctgatcagaggactgtccaagatcgagctgaacatcctggaagaggccgctcacctgttcaaggacaagtga

SEQ ID NO: 125 - DNA, 492 bp, Artificial Sequence
  Synthetic
atgatcaccaacagcttcgacagctggatcctgatgctggacccttaccagggcgagagcatcagccactttctgggcagattccggcgcgagaatagcctgaccgtgaacaacctgggcaaagccacagagctgtacggcgccattgccagatgggagaagttccggttcaaccctccacctagcagcgagcagctgaagaaactgagcgccatcgtgcaggtcgaggtggccacactgcagaccatgtttcccagcgctcccatgaagatgacccctatcagactgtgcagcgcctgctacggcgagaagccctaccacaagatggaatggcagtacaaagaaatctacaagtgcgaccggcaccagctgaagctgctgagcgagtgtcctaattgcggcgccagattcaagttccccagcctgtgggttgacggctggtgccacagatgcttcacccctttcgccgagatgaagcagcagaaggactga

SEQ ID NO: 126 - DNA, 500 bp, Artificial Sequence
  Synthetic
atacaagaatcaaaaaatttgaaaattacaaaggcttacggagtttgacaaaagaaagagtattgattcaagtttaagtaagatagtaagctcttgtacagtaacaaattaaatgacgtgataacaaattagtgttatctaaaaataagactcttcaaatctttgcatatcaataattataactaattcttcccctaaaacaaggagcgatcgcacctcaaatgggattaacaaattaagtgtcatcttccagaaaaataacaaattaaatgtcgtctttctaaaaggcgattttttgttttaggggttgtcattaacaaattagatgtcctaagattagtataaaaccattatgattttattaaacagctaagagaaaactatgaccatcgataatcaattttctgattctccagaattgatctctcaactttctcccgaagaccaaaaaatcgctgatgttattgaaaatttacttcaaccttgtgacaagaaaactt

SEQ ID NO: 127 - DNA, 500 bp, Artificial Sequence
  Synthetic
gttgaaataagacaataccttctatagggtttataatattaatagtgccgtagatcaagttttcataacctctgttctatgaaaaatgaggagtagtttacttcttataagaagtttgctttctgcttctgctaactacttgccctgatgctgtctatcttaaagatagagaaactaggcgcactcccagcaataagggtgcaggtgtactgctatagcggttagcgaatcacttccgagcaaggaagaattctctttgagaattgaaagcgagtccctccacgtcctagtcattgaattggcgacattaatttgtgatcacgtcatttaatttgttaagacgacattaatctgttaccgatgacaaataatttgttactgtacagctctaatcttttagagttaactgttatgactttggagctatctataatttatttacgggcgtggagggactcgaacccccgacctgctgatccgtagtcagccgctctaatcca

SEQ ID NO: 128 - DNA, 1731 bp, Artificial Sequence
  Synthetic
atgtacatgcggaacgagacacccatcacacccgacaacctggaaaccgagagcgtgaccgccaaggacacccagatcatcgtgtctgagctgagcgacgaggccaagctgaagatggaaatcatccagagcctgctggaagccggcgacagaacaacatacgcccagagactgaaagaggccgccgtcaagctgggaaagtctgtgcggacagtgcggcggctgatcgacaagtgggaacaagagggactcgtgggcctgacacagaccgacagagtggataagggcaagcaccgcgtggacgagaactggcaagagttcatcctgaaaacctacaaagagggcaacaaaggcggcaagcggatgaccagacagcaggtcgccatcagagtgaaagtgcgggcagatcagctgggcgtgaagcctccatctcacatgaccgtgtaccggatcctggaacctgtgatcgagaagcaagagaaggccaagagcatcagaacccctggctggcggggaagcagactgagcctgaaaacaagagatggcctggacctgagcgtggaatactccaaccacatctggcagtgcgaccacaccagagccgatatcctgctggtggatcagcacggcgaactgctggctagaccttggctgaccaccgtgatcgacacctacagcagatgcatcatcggcatcaacctgggcttcgacgcccctagttctcaggttgtggctctggccctgagacacgccatcctgcctaagaagtatggcgccgagtacggcctgcacgaggaatggggaacatacggcaagcccgagcacttctttaccgacggcggcaaggacttcagaagcaaccatctgcagcagatcggcgtgcagctgggctttgcctgtcacctgagagactgtcctagcgaaggcggcatcgtggaaagacctttcggcaccctgaacaccgacctgttctctaccctgcctggctacaccggcagcaacgtgcaagaaagacctgaggaagccgagaaagaagcctgtctgaccctgagagagctggaacggctgctcgtcagatacctggtggacaagtacaaccagagcatcgacgccagactgggcgatcagaccagataccagagatgggaggccggactgatcgtggcccctaacctgatcagcgaagaggacctgcggatctgcctgatgaagcagaccaggcggagcatctacagaggcggctacctgcagttcgagaacctgacataccggggcgagaatctggccggatatgccggcgaatctgtggtgctgagattcgaccccaaggatatcaccaccatcctggtgtaccggcagaccggctttcaagaagagttcctggccagagcttacgcccaggatctggaaacagaggaactgtccctggatgaggccaaggccatgagcagaagaatccggcaggccggcaaagagatcagcaacagatccatcctggccgaagtgcgcgaccgggaaaccttcgtgaagcagaaaaagaccaagaaagagcgccagaaagaggaacaagtcgtcgtcgagaaggcctccagcgagagaagcagaaccgccaagaaacccgtgatcgtggaacccgaagagatcgaggtggccagcgtggaaagcagcagcgacacagatatgcccgaggtgttcgactacgagcagatgagagaagattacggctggtga

SEQ ID NO: 129 - DNA, 837 bp, Artificial Sequence
  Synthetic
atgatcagccagcaggctcagggcgttgcccaagagctgggagacatcctgcctaacgacgagaagctgcaggccgagatccaccggctgaacagaaagagcttcatccctctggaacaagtgaagatgctgcacgactggctggacggcaagagacagagcagacagtctggcagagtgctgggcgagagcagaaccggcaagaccatgggctgtgacgcctacagactgcggcacaagcctaagcaagagcccggcaaacctcctacagtgcccgtggcctacatccagattcctcaagagtgcagcgccaaagagctgttcgccgccatcatcgagcacctgaagtaccagatgaccaagggcaccgtggccgagattagagacagaaccctgcgggtgctgaaaggctgcggagtggaaatgctgatcatcgacgaggccgaccggttcaagcccaagacctttgctgaagtgcgggacatcttcgacaagctggaaatcgccgtgatcctcgtgggcaccgatagactggatgccgtgatcaagcgggacgaacaggtgtacaaccggttcagggcctgccacagattcggcaagtttagcggcgaggacttcaagcggaccgtggaaatctgggagagacaggtgctgaagctgcctgtggccagcaatctgtctggcaaggccatgctgaaaaccctgggagaagccaccggcggctatatcggactgctggacatgatcctgagagagagcgccattcgggccctgaagaagggcctgtctaagatcgacctggaaaccctgaaagaagtgaccgccgagtacaagtga

SEQ ID NO: 130 - DNA, 522 bp, Artificial Sequence
  Synthetic
atggaagtgggcgagatcaacccatggctgttccaggtggaacccttcgagggcgagagcatctctcactttctgggcagattcagacgggccaacgacctgacaacaaccggcctgggaaaagccgctggtgttggcggagccatcagcagatgggagaagttccggttcaaccctccacctagccggcagcaactggaagccctggccaaagtcgtgggagtcgatgccgatagactggccagaatgcttcctcctgctggcgtgggcatgaacctggaacctatcagactgtgcgccgcctgctacgtggaaagcccttgtcacagaatcgagtggcagttcaaagtgacccagggctgcgaggatcaccacctgtctctgctgagcgagtgccctaattgcggcgccagattcaaggtgccagctctgtgggttgacggctggtgcctgagatgcttcaccctgtttggcgagatggtcaagagccagaacttcatcgagagccacaacaagatctga

SEQ ID NO: 131 - DNA, 500 bp, Artificial Sequence
  Synthetic
aaggggaaagagggaacagggaatagggaacagggaatagggaacagggaacagggaatagggaatagggaatagggtaaagaggcaatatttttgtacattaactaattatttgtcaatttaacaaaatattgtcacaaaaaataaaaattattgaaaccctgctataacaaggatcatagcagggtttagttattataccttctaatcattttgtgaaaccttttttaacaaattaattgtcaaaaaagggaaaattaacaatttaagtgtcaattcccaaaatccatgtaaactactctacttctgaaaatttcacacattaaatgtcacttttgatttataatatacaaatatgttccaattaaacatcaatgtatatgaggaatgaaacacctataactccagacaacttagaaactgaaagtgttaccgccaaagatactcaaatcattgtgtcggaactttccgacgaggcgaaactaaaaatggagattatt

SEQ ID NO: 132 - DNA, 500 bp, Artificial Sequence
  Synthetic
aacacccctcccggattggggcgggttgaaagacatttatgcaagtataataaaaaatatctgggtgggttgaaagatcagtaggtcgtgggtttaactctgaaaacactatataaatacagtgttgcttgtgatagttagggacaattaatttgttaacagtgacacgaattagttaaaatgacattaatctgttaacagtgacaaataaattgttaatgtacacgaacgtacaacctaaagccgatgatgagatttgaactcacgacctactgattacgaatcagttgctctacccctgagccacatcggcgcatacagtctagtataataacataatttactaatgatggaacaaaattctcaaaataatcttaaacctcaacaatatcaacgcctcaaagccgaagcagccgcaccctatcggggtttgcggaaatttatctatatcagcgtcggtgcatcgggctttatcggtgcattcgtcttcttctttcaac

SEQ ID NO: 133 - DNA, 1866 bp, Artificial Sequence
  Synthetic
atggccgacgaggaattcgagctgaccgaggaactgacccaggtgccagacaacatcctgctggacaagcggaacttcgtggtggaccccagccagatcatcctggaaaccagcgacagacagaagctgaccttcaacctgatccagtggctggccgagtctcccaacagaaccatcaagagccagcggaagcaggccgtggccgatacactgaatgtgtccaccagacaggtggaacggctgctgaagcagtacgacgaggaccggctgattgagacagccggaatcgagagagccgacaagggcaagtaccgggtgtccaagtactggcaggacttcatcaagaccatctacgagaagtccctgaaggacaagcaccctatcagccccgcctctatcgtgcgcgagctgaagagacacgccatcgtggatctgggactgaagcctggcgacttccctcaccaagccaccgtgtacagaatcctggatcctctgatggaacagcacaagcgcaagaccaaagtgcggaatcctggcagcggcagctggatgacagtggtcacaagagagggccagctgctgaaagccgacttcagcaaccagatcattcagtgcgaccacaccaagctggacatccggatcgtggacatccacggcagcctgctgtctgacagaccttggctgaccaccattgtggacacctacagcagctgcgtcgtgggcttcagactgtggatcaagcagcctggcagcaccgaagttgccctggctctgagacatgccatcctgcctaagcactaccccgacgactaccagctgaacaaggcctgggagatctggggccctccattccagtactttttcaccgacggcggcaaggacttcagaagcaagcacctgaaggccatcggcaagaaactgggcttccagtgcgagctgagggacagacctcctgaaggcggcatcgtggaacggatctttaagaccatcaacacccaggtcctgaaggatctgcctggctacacaggcgccaacgtgcaagaaagacccgagaacgccgagaaagaggcctgcctgaaaatccaggatctggatcggatcctggccagcttcttctgcgacatctacaaccacgagccttatcctaagcagccctgcgacaccagatgcgagagatggttcaaaggcatgggcggcaagctgcctaggatcctggacgagagagagctggatatctgcctgatgaaggaagctcagagagtcgttcaggcccacggctccatccagttcgagaacctgatctacagaggcgagtctctgaaggcctaccggggcgagtatgtgaccctgagatacgaccccgaccacatcctgacactgtacgtgtacagctgcgagacagacgacggcgtggaaaacttcctggattacgcccacgccgtgaacatggacacccacgatctgagcgtggaagaactgaaggccctgaacaaagagcggagcaaggccagaagagagcacttcaactacgacgccctgctggccctgggcaagagaaaagaactggtggaagagtgcaaagaggacaagaaagagaagcggcggctggaacagaagcggctgagaagcaccagcaagaaaagcagcaacgtgatcgagctgcggaagatcagagcctccaccagcctgaagaaggacgacagacaagaggtgctgcccgagagagtgggccgcgaggaaatcaagatcgagagaatcgagccccagctgcaagaggacatcagcgtgcagaccgacactcaagaggaacagcggcacaagctggtggtgtccaaccggcagaagaacctgaagaaaatctggtga

SEQ ID NO: 134 - DNA, 855 bp, Artificial Sequence
  Synthetic
atggccagaagccagctgaccacacagagcttcgtggaagtgctggcccctcagctggacctgaaggatcagatcgccaagaccatcgacatcgaggaactgttccggacctgcttcatcaccaccgacagagccagcgagtgcttcaagtggctggacgagctgcggatcctgaagcagtgtggcagagtgatcggccccagagatgtgggcaaaagcagagctgccctgcactaccggaacgaggacaagaaacgggtgtcctacgtgaaggcttggagcgccagcagcagcaagagactgttcagccagattctgaaggacatcaaccacgccgctcctaccggcaagagacaggatctcagacctagactggccggcagcctggaactgtttggcctggaaatcgtgatcatcgacaacgccgagaacctgcagaaagaggccctgatcgatctgaagcagctgttcgaggaatgccacgtgccaatcgtgctcgtcggcggaaaagagctggacgatatcctgcagggctgcgacctgctgaccaactttcccacactgtacgagttcgagcggctggaatacgaggacttcagaaagaccctgagcaccatcgagttcgatgtgctggcactgcccgaggcctctaatctcggcgagggcaacatcttcgagatcctggccgtgtccaccaacgccagaatgggcctgctggtcaagatcctgacaaaggccgtgctgcacagcctgaagaacggcttcagcagagtggacgagagcatcctggaaaagatcgccagcagatacggccggaagtacatccctctggaaaaccggaaccggaacggctga

SEQ ID NO: 135 - DNA, 537 bp, Artificial Sequence
  Synthetic
atggacgaggacaacaagatcctgcctaagctggcctacgtggaaccctacatcggcgagagcatcagccactacctgggcagactgcggagattcaaggccaacagcctgcctagcggctacagcctgggaaagattgctggactgggcgccgtgatcagcagatgggagaagctgtacttcaacccgtttcctacacagcaagagctggaagccctggcctctgttgtgggagtgaacgccgatagactgaccgagatgctgcctcctaagggcatgaccatgaagcccagacctatcagactgtgcggcgcctgttatgccgagtctccctgccacagattcgagtggcagttcaaggacatcatgaagtgcgacggctacgccggcagaaggcacagacacgaactgagactgctgaccaagtgcatcaactgcgagacaccctttcctatacctgccgactggatcaagggcgagtgccctcactgtagcctgcctttcgccaacatggccaagcggcagagaagagactga

SEQ ID NO: 136 - DNA, 500 bp, Artificial Sequence
  Synthetic
tgcccggttgattaaaggaagaaccgacctatcaagcggacactaatttgtcaaagcgacatcaatttgacaacgacgacaaataattagtcaatcgacaaattttgtacattcgcacattatatgtcgcaattctcaagccaggtcgtaactgcttttaaagcctgagaactcaatcgtgtaaccatcgtagtctatttacctataaaagacaaactaacttgattcgcatattgtacgtcgtaaacgtcagtttcgcaaattgattgtcgtttatgaaaatttaggtgttttgcaaattagaagtcgcatttttgataagataatggtacattagtaccttaattatttacgagtggatttcactctaatggcagacgaagaatttgaacttactgaagaattgacacaagttccggacaatattttacttgacaagagaaattttgtcgtagacccatcgcaaattattctggaaacttcggataggcaaaaactga

SEQ ID NO: 137 - DNA, 500 bp, Artificial Sequence
  Synthetic
gtttcaaagaccatcccggctggaggtaagttgaaagaggcgtgagtggtgaggttcaaaaactatccgaccaggggtatgttagaagagaatagcaatttttgttattgatacttcacggatgtatttttcaaggggagggtagaaaggcgcacttcgttcgggattatcctaaagtttgtcagtaaattataaaagtagtggactaaacttcatcttaagacagtctacgacatcaatttgcaaaaactcagtgtgattaaatcacatcattaaaactactaaggcaacattaatttgcgagtaacgacactaatttgcgaattgcgacatataatgtgcgaatgtacaaatttaagtcgggatgactggattcgaaccagcgaccccttcgtcccgaacgaagtgcgctaccaagctgcgctacatcccgcgaaaaaatgctttcatttcacgcctttctatcctacaccaaacgcaccaattcccgcacttttaga

SEQ ID NO: 138 - DNA, 1692 bp, Artificial Sequence
  Synthetic
atgaacagcgagagcaccagcgagacaaacagcaagctggccatcagcgacctggaagatgaccgcgagatcgtgatcaccagccagctggaaggcaaggccaaagaacggctggaagtgatccagagcctgctggaaccttgcgacagagccacatacggcgagagacttagagctggcgccaagaaactggacatcagcgtcagaagcgtgcagcggctgttcaagaagtaccaagagcagggcctgacagccctggtgtccaccaacagagtggacaagggcaacagacggatcagcagcttctggcaggacttcatcctgcagacctacatccagggcaacaagggcagcaagcggatgagccctaaacaggtggccattagagtgcaggccaaggccagcgagatcaaggacaacaagcctcctagctacaagaccgtgctgcggctgctgaagcccatccagaagaagaaagagcggaccatcagaagccctggctggcagggaacaaccctgagcgtgaaaaccagagatggccaggacatccagatcaaccacagcaatcaagtgtggcagtgcgatcacaccctggtggatgtgctgctggtggatagacacggcgagctgattggcagaccttggctgaccaccgtggtggacagctacagcagatgcgtgatgggcatcaacctgggcttcgatgcccctagctctctggtggttgctctggccctgagacacagcatcctgcctaagaactactcccaggatttccagctgtactgcgactggggcgtgttcggactgcctgagtgcctgtttacagacggcggcaaggacttccggtccaaccatctggaagagatcgccacacagctgggcttcatccggaagctgagagacagacctagcgaaggcggcatcgtggaaagacccttcaagaccctgaatcagagcctgttcagcaccctgcctggctacacaggcagcaacgtgcaagagaggcctaaggacgccgagaaggatgccagactgaccctgagagatctggaaatgctgatcgtgcggttcatcgtggacaagtacaaccagagcacaatcgccggcaaggatgagcagacccggtatcagagatgggaggccggactgatcaaggatcccaagatcatcagcgagagagagctggacatctgcctgatgaagtctaagcggcggacagtgcagagaggcggccatctgcagttcgagaacatcatctaccggggcgagtacctggccggctatgagggcgatattgtgaacgtgcggtacaaccccatcaacatcaccaccatcctggtgtatcggcgcgagcagggcaaagaggtgttcctgacaagagcccacgctctcggatgggagacagagatccacagcctgtctgaggccagagccagcgtgaagagactgagacaggccaagaagaagatcagcaacgagtccatccaccaagagatcctgctgagggacagcgccgtggataagaagaagtccagaaagcagcggcagaaagaggaacagagctacaagctgatcacaagccccaaggtggtggcccaggatatcgagtctcaagagatcgagcgggacatctccgccgagatcgctgatgtggaagtgtgggacttcgacgaactcgaggacgagtga

SEQ ID NO: 139 - DNA, 852 bp, Artificial Sequence
  Synthetic
atggtcacagaggccaaggccattgccgacaagctgggcaagatcgagctggacgaagagtgggtgcagaaagagatcgcccggctgaaccggaagtctacagtggccctggaacacatcaaagagctgcacgactggctggacggcaagagaaagagcagacggtcctgcagaatcgtgggcaagagcagaaccggcaagacagtggcctgtgaagcctacgtgatgcggaacaagctgaacaagcctcctcaagagcggcagaccaagaatcagatccccatcgagcccgtgatcatgattatgcctccacagaagtgcggcgccaaagaactgttccgcgagatcatcgagtgcctgaagttcagagccgtgaagggcaccatcagcgagttcagatccagagccatggacgtgctgcagaaatgccaggtggaaatgctgatcatcgacgaggccgaccggctgaagcctgagacattttccgaagtgcgggacatctacgacaagctcgagatcgccgtggtgctcgtgggcaccgaaagactggataccgccgtgaagagagatgagcaggtcgagaacagattccgggccaacagaagattcggcaccctggaaggcatcaacttcaagaaaaccgtcgagatctgggaagagaagatcctgaagctgcccgtggccagcaacctgaccaacaagaccacctggaagattctgctgatcgccaccgagggcttcatcggcagactggacgagattctgagagaggccgctatcgccagcctgtctcagggacacaagaaggtggaccccaaaatcctgaaagagattgccagagagtacagctga

SEQ ID NO: 140 - DNA, 423 bp, Artificial Sequence
  Synthetic
atgaacaacaccaaagaggcccagctctggctgttccccgtggaaccttctaatggcgagagcctgagccacttcctgggcagattcaggcggagcaaccacctgtctccaagcgctctgggagatctggctggaattggcggagtggtggccagatgggagagattccacctgaatccatttccaaccgacgagcagtttcaggccctggccgaagtggtggatgtggatagcagcaccctgagagagatgctgcctcctaaaggcaccggcatgaagtgcgaccggcacaacctgaagctgatctccaagtgtcccaactgccgggccaagttcaagatgcctgctctgtgggagtacggctgctgccacagatgcagactgccttttgccgctatcgcccagtaccagcagagcgtgtaa

SEQ ID NO: 141 - DNA, 500 bp, Artificial Sequence
  Synthetic
cgctagtacattccagcgtcctatcaacagaagtagaattccctgaatgatgccactaattccactattaataggaacctcttctttttgaataaatatgtacggtgactaattatttgacataatgacaaattgttgtcatgcaattcaaagctttatatgctaggcatcatagcatttttattataatatttgattgacttatataatgacaaacaaaatgtcgtttgtttgcaaaatgactaattagctgtcgtttattgaaaattcagttttaaagaaaagtgacaagatctgtgtcacttttttatttaaatatagaattacattatgtgttttttaaaaaaactaatttactaaaatgaatagtgaaagcacttccgaaacaaattcaaaattagctatatctgatttggaagacgaccgagaaatagtcattacttctcagctagaaggaaaagcaaaagagagactggaggtcattcaaagtttgctcgaac

SEQ ID NO: 142 - DNA, 500 bp, Artificial Sequence
  Synthetic
gtttcaatgaccattttgtgatggcttgggttgaaagataaaggcttagtcattgttattgatgaagcggaagtgccaacgaccacacgcaaattttaattctcaataactatcgtctaattctcgctaagaaactgaaagtaattttaaagtcttgttctttggttactccaagtaatttattacttttaggcgatcgccttgcttgccgagtttaatttgtatcagcaattgctgtatacagtctaaaaccaagtaaattcgattaattattttttgtgcgacgcagtaagtcgcttgatttaagtgaaaatttcatgactgaggttatggatttctagtagatttcatcctactattcccacgtaaaggagtctcgtactctggtcacattgaaagtaaataatgaactcaatggaatgcagaccatgaatgtatccgaaggtggataacctctatccagctagggctagggaaaagttggaagggttaatgtaaat

SEQ ID NO: 143 - DNA, 1743 bp, Artificial Sequence
  Synthetic
atggacgagatgcccatcttcaaccagaacgacgagagcctgctgttcgagaacaacgccgacatcgacgagatccaggacgacgagtccgaggaagccaacctgatcttcacagagctgagcgccgaggccaagatcaagatggaagtgatccagggcctgttcgagccctgcgacagaaagacatacggccagaagctgagaacagccgccgagaagctgggaaagacagtgcggacagtgcagcggctggtcaagaagtatcagcaggacggcctgagcgccatcgtggacacccagagaaatgacaagggcagctaccggatcgaccccgagtggcagaagttcatcatcaccaccttcaaagagggcaacaagggctccaagaagatgacccctgctcaggtggccatgagagtgcaagttcgggctgaacagctgggcctgaagaaataccccagccacatgaccgtgtaccgggtgctgaaccccatcatcgagcggcaagagcagaagcagaaacagcggaacatcggctggcggggctctagagtgtctcacaagaccagagatggccagacactggacgtgcggtacagcaatcacgtgtggcagtgcgaccacaccaagctggatgtgatgctggtggaccagtacggcgagcctcttgctagaccttggctgaccaagatcaccgacagctacagccggtgcatcatgggagtgcacgtgggctttgatgcccctagctctcaggttgtggccctggctctgagatacgccatcctgcctaagcagtacagcgccgagtacaagctgctgagcgagtggcggacatctggcatccccgagaacctgtttaccgacggcggcagagacttcagaagcgagcacctgaagcagatcggcttccagctgggcttcgagtgtcacctgagagacagacctagcgaaggcggcatcgaggaaagaagcttcggaacaatcaataccgagttcctgagcggcttctacggctacctgggcagcaacatccaagagagatccaagaccgccgaggaagaggcctgtctgacactgagagagctgcatctgctgctcgtgcgctacatcgtggataactacaaccagaggctggacgcccggaccaaggaccagaccagatttcagagatgggaggccggactgcccgctctgcctaagatggttcgagagcgcgagctggacatctgcctgatgaagaaaacccggcggagcatctacaaaggcggctatctgagcttcgagaatatcatgtaccggggcgactacctggccgcctatgccggcgaaaacatcgtgctgagatatgaccccagagatatcaccaccgtgtgggtgtacagaatcgagaagggcaaagaggtgttcctgtccgccgctcatgccctggattgggagacagaacagctgtccctggaagaagccaaggccgcctctagaaaagtgcggagcgtgggcaagaccctgaccaacaagtctatcctggccgagatccacgacagagacacctttatcaagcagaagaagaagtcccagaaagagcgcaagaaagaggaacaggctcaggtccacagcgtgtacgagcccatcaacctgagcaagaccgagcctctggaaaacctgcaagagacacccaagcctgagacacggaagccccgggtgttcaactacgagcagctgagacaggactacgacgagtga

SEQ ID NO: 144 - DNA, 837 bp, Artificial Sequence
  Synthetic
atgaaggacgactactggcagaagtggatccagaacctgtggggcgacgagcccattcctgaagaactgcagctggaaatcgagcggctgctgacacctagcgtggtggaactggaacacatccagaagatccacgactggctggacggcctgagactgtctaagcagtgcggcagaattgtggcccctcctagagccggcaagagcgtgacatgtgacgtgtacagactgctgaacaagccccagaagagaggcggcaagcgggatattgtgcccgtgctgtatatgcaggtccccggcgattgctctagcggagaactgctggtgctgatcctggaaagcctgaagtacgatgccaccagcggcaagctgaccgacctgagaagaagagtgcagaggctgctgaaagaaagcaaggtggaaatgctgattatcgacgaggccaacttcctcaagctgaacaccttcagcgagatcgcccggatctacgacctgctgagaatcagcatcgtgctcgtgggcaccgacggcctggacaacctgatcaagaaagagccctacatccacgaccggttcatcgagtgctacaggctgcctctggtgtccgagaagaaattccccgagctggtcaagatctgggaagaagaggtgctctgcctgcctctgcctagcaatctgatccggaacgagacactgctgcccctgtaccagaaaaccggcggcaagatcggcctggtggatagagttctgcggagagcctctattctggccctgagaaagggcctgaagaatatcgacaaggacaccctggccgaggtgctggattggttcgaatga

SEQ ID NO: 145 - DNA, 504 bp, Artificial Sequence
  Synthetic
atggaaatcggagccgaggaaccccggttcttcgaggtggaacctctgaatggcgagagcctgagccacttcctgggcagattcagaagagagaactacctgaccagcagccagctgggcaagctgacaggactgggagccgtgatcagcagatgggagaagctgtacttcaacccatttccaaccaggcaagagctggaagccctggccacagtcgtcagagtgaacgccgatagactgaccgagatgctgcctctgaagggcgtgaccatgaagcccagacctatcagactgtgcgccgcctgctatgccgagtatccctgtcacagaatcgagtggcagttcaaggacaagatgaagtgcgaccggcacaacctgcggctgctgaccaagtgcatcaactgcgagacaccctttcctatacctgccgactgggtggaaggcgagtgcagccactgctttctgccttttgccaccatggccaagcggcagaaaagccggtaa

SEQ ID NO: 146 - DNA, 500 bp, Artificial Sequence
  Synthetic
tagctgaaagttagggaaatacgtaaattatgtcgtttagcactgtcaaattggacaataattctttaaaactgacaataatgatttaatggacatgtcgattaactaattatttgtcgtcttaacaaaataatgtcgtcaaagataaaatgtttgaaaacgttgctaaataagtgtttgcagcgttttttagtatgtcaacaatcaagaccgaatttaacattttaattgtcgtatattaaaatattcacaaattttatgtcgttttttcagatttgagttttccaaattttttggaatgtataacaaattagttgtcgctttttagcaaaaatagtgctattataatattatttagtatatatgtactaaataatacattctcataccaaaaagttactacttccattgacgggtcaaccgctttaggaagattggatgttagcgcacaatagcgagtttgatattactgttttgagcatgaatcaagttttcctatg

SEQ ID NO: 147 - DNA, 500 bp, Artificial Sequence
  Synthetic
gtttcaacaaccatttaagctaagcaggtgttgcaaaaataagtatatagagactatttacttgcactaactaggctttagaattgttgaagggtataactgagttattaggagggttgaaaggagcgctgcgatcgaacaaaaatcaaagtcagtggttaagcataatcaacaattcaatgacattaatgtgttaacagttgactaagttaaatcgatgacattaatttgttaaaagcgacgctaatttgttaataacgacaataatctgttaacaacgacaaataattagttaatcgacaggacatatggagaatagggaactcgaatccctgacctctgcggtgcgatcgcagcgctctaccagctgagctaattccccttaaaagtgctgagtcttgctaactcaacgcactactacaatataatattttaacattctcctgctgtaggctgagactctttttgtaaaaagacttcttgtactcgttcaagttcta

SEQ ID NO: 148 - DNA, 1857 bp, Artificial Sequence
  Synthetic
atgcccgacaaagagtttggactgaccggcgagctgacccaagtgaccgaggccatctttctgggcgagagcaacttcgtggtggaccctctgcacatcatcctggaaagcagcgacagccagaagctgaagttccacctgatccagtggctggccgagtctcccaacagacagatcaagagccagcggaagcaggccgtggctgatacactgggagtgtccaccagacaggtggaaagactgctgaaagagtacaacgaggaccggctgaacgagacagctggcgtgcagagatctgacaagggccagtacagagtgtccgagtactggcaagagtacatcaagaccacctacgagaacagcctgaaagaaaagcaccctatgagccccgccagcgtcgtgcgggaagtgaaaagacacgccatcgtggatctgggcctcgagcagggcgattatcctcatcctgccaccgtgtaccggatcctgaatcctctgatcgagcagcagaaactgaagaagaagatcagaaaccccggcagcggcagctggctgaccgtggaaacaagagatggcaagcagctgaaggccgagttcagcaaccagatcatccagtgcgaccacaccgagctggacatccggatcgtggacaacaatggcgtgctgctgcccgaaagaccttggctgacaaccgtggtggataccttcagcagctacgtgctgggctttcacctgtggatcaagcagcctggaagcgccgaagttgccctggctctgagacacagcatcctgcctaagcagtacagccacgactacgagctgagcaagccttggggctacggccctccattccagtactttttcaccgacggcggcaaggacttcagatccaagcacctgaaagccatcggcaagaaactgggatttcagtgcgagctgcgggacagacctaatcaaggcggcatcgtggaacggatcttcaagaccatcaacacacaggccctgaaggacctgcctggctacacaggcagcaacgtgcaagagaggcctgagaacgccgagaaagaagcctgcctgaccatccaggacatcgacaaagtgctggccggcttcttctgcgacatctacaaccacgagccttatcctaaggaccccagagacaccagattcgagcggtggttcaaaggcatgggcggcaagctgcctgagcctctggatgagagagagctggatatctgcctgatgaaagaaacccagagagtggtgcaggcccacggcagcatccagtttgagaacctggtgtacagaggcgagagcctgagagcctacaagggcgagtatgtgaccctgagatacgaccccgaccacatcctgacactgtacgtgtacagctgcgacgccaacgacgacctgggcgattttctgggatatgtgcacgccgtgaacatggacacccaagagctgtccctggaagaactgaagtccctgaacaaagagcggaacaaggccctgagagagcactgcaattacgacgccctgctggccctgggcaagagaaaagagctggtcaaagagcgcaagcaagagaagaaagagatccggcaggccgaacagcagaggctgagaagcggcagcaagaaaaactccaacgtggtggaactgagaaagagccgggccaagaactacctgcggaacaacgagcctatcgaggtgctgccagagcgggtgtccagagaagagatccaggtgcagaaaaccgaggtgcagatcgaggtgtccgaacaggccgacaacctgaagcaagaacggcaccagctcgtgatcagcagacggaagcagaacctgaaaaacatctggtga

SEQ ID NO: 149 - DNA, 855 bp, Artificial Sequence
  Synthetic
atggctcagtcccagctggccatccagcctaacgtggaagttctggcccctcagctggacctgaacaaccagctggctaaagtgatcgagatcgaggaaatcttcagcaactgcttcatccccaccgaccgggccagcgagtacttcagatggctggacgagctgcggatcctgaagcagtgtggcagagttgtgggccccagagatgtgggcaagagcagaacaagcgtgcactacagagaagaggaccggaagaaagtgtcctacgtcagagcttggagcgccagcagcagcaagagactgttcagccagattctgaaggacatcaaccacgccgctcctaccggcaagagagaggatctcagacctagactggccggcagcctggaactgttcggaatcgagcaagtgatcgtggacaacgccgacaacctgcagagagaggctctgctggatctcaagcagctgttcgacgagagcaacgtgtccgtggtgctcgttggaggccaagagctggacaagatcctgtacgacttcgacctgctgaccagctttcccacactgtacgagtttgaccggctggaacaggacgacttcctgaaaaccctgagcaccatcgagttcgacgtgctggctctgcctgaggccagcaatctgtgcaagggcatcaccttcgagatcctggccgagacaacaggcggcagaatgggcctgctggttaagatcctgaccaaggccgtgctgcacagcctgaagaatggcttcggcagagtggaccagggcatcctggaaaagatcgccaacagatacggcaagcggtacatccctcctgagaaccggaacaagaacagctga

SEQ ID NO: 150 - DNA, 561 bp, Artificial Sequence
  Synthetic
atggccagagacacctttccacctaagatcgagatccgcatccacgacaaccacgaggccctgctgagactgggctacgtggacccttatgagggcgagagcatcagccactacctgggcagactgcggagattcaaggccaacagcctgcctagcggctacagcctgggaaagatcgccggaattggcgccgtgaccaccagatgggagaagctgtacttcaacccatttccgagcaacaaagagctggaagccctgggcaagctgatctgcctgcctaccaaccggatctacgagatgctgcctcctaagggcgtgaccatgaagcccagacctatcagactgtgcgccgcctgttatgccgaggtgccctgtcacagaatcgagtggcagtacaaggacaagatgaagtgcgaccggcacaacctgcggctgctgaccaagtgcaccaactgcgagacaacattccccattccagccgactgggtgcagggcgaatgccctcactgctttctgccctttccaatgatggtcaagcggcagcggcagctgagcaactaa

SEQ ID NO: 151 - DNA, 500 bp, Artificial Sequence
  Synthetic
tttcaaattcacttaattaaacctgttgaacaaccacaattgctaaatgcgatcaggcaaattttggctaacttagattaattcttaattaacgtgtacattcgcacattatatgtcgcaattcgcaaaaaacgacatgagcgtctttatcatctaaaacgcttatcatataaagctttcaggacattgttgactaaaaatacaaaattccttaattcgcacattaaatgtcgttagaactgaaatttgcaaattaatgtcgtttatttaaattttgccacattgcaaattcaatgtcgcattttctttagttaatggtacattaatactaccaataactacattctccttgcttaaatgccagacaaagaatttggattaaccggagaattgacacaagttacggaagctattttccttggtgaaagtaattttgtggtcgatccattacacattattctggaatcctcagatagccagaaactcaaatttcatctcat

SEQ ID NO: 152 - DNA, 600 bp, Artificial Sequence
  Synthetic
agtttcaacaaccggctaggggtgggttgaaagcaccgtaagcactccacttacatctgagttgcttatcagggtttcaacaaccatcccggttaggggtgggttgaaaggacaataattatttaataagccacaagctttcgcagggttcaacaaatattgaggttatggcagttttgcaaaaacaagcatatagagattatttattcgcattaaccaggttttaaaatagttaaagggtatacatgaattattaggagggttgaaaggagcgctgcgatcggacaaaattcaatgaggaaataattcgcttgcggtaaacttgacagctaatgactaaacaatacgacgttaatttgcgaaacgttaatataaccgaattagtggcacgaattagggaaagcgacattaatgtgcaaacaacgacaccaatttgcgaagaacgacatataatgtgcgaatgtacagtacaaatggagaatagggaactcgaatccctgacctctgcggtgcgatcgcagcgctctaccaactgagctaattccccttaaaatggttgttgctgagttaatcaaattactagcaattcaatcaacgctc

SEQ ID NO: 153 - DNA, 1683 bp, Artificial Sequence
  Synthetic
atgctggacgaccccgacaagggcaatcaagagcctgagacacacgagatcgtgaccgagctgagcctggacgaacagcatctgctggaaatgatccagaagctgatcgagccctgcgaccggatcacatacggcgagagacagagagaggtggccggcaagctgggaaagtctgtgcggacagttcggcggctggtcaagaagtgggagcaagaaggactgacagccctgcagacagccaccagaaccgataagggcacccacagaatcgacagcgactggcaggacttcatcatcaagacctacaaagagaacaacaaggacggcaagcggatgagccccaaacaggtggcactgagagtgcagaccaaggccgaagaactgggccagcagaagtaccccagctaccggacagtgtacagagtgctgcagcccatcatcgagcagaaagagcaaaaagagggcatcagacacagaggctggcacggctctagactgagcgtgaaaaccagagatggcaaggacctgttcgtggaacacagcaaccacgtgtggcagtgcgaccacaccagagtggatctgctgctggtggatcagcacggcgagctgctttctagaccctggctgaccatcgtggtggacacctactccagatgcatcatgggcatcaacctgggcttcgacgcccctagctctcaagtgattgctctggccctgcggcacgccatcctgcctaagagatacggctctgagtacggcctgcacgaggaatggggcacctatggaaagcccgagcacttctacaccgacggcggcaaggacttcagaagcaaccatctgcagcagattggcgtgcagctgggctttgtgtgtcacctgagagacaggcctagcgaaggcggcatcgtggaaagacctttcggcaccttcaacaccgacctgttcagcaccctgcctggctacacaggcagcaacgtgcaagagaggcctgagcaggccgagaaagaggcctgtatcaccctgagagagctggaaagactgctcgtgcggtacatcgtggacaagtacaaccagagcatcgacgccagactgggcgatcagacccggtatcagagatgggaggccggactgatcgtggcccctaacctgatcagcgaggaagaactgcggatctgcctgatgaagcagacccggcggagcatctacagaggcggctatgtgcagttcgagaacctgacctaccggggcgaaaatctggccggatatgccggcgagaacgtggtgctgagatacgaccccaaggacatcaccacactgctggtgtaccggcagaagggaaatcaagaagagttcctggccagagcctacgctcaggacctggaaacagaggaactgtctgtggacgaggccaaggccatgagcagaagaatcagacaggccggaaaggccatcagcaaccggtctattctggccgaagtgcgggaccgcgagacattcgtgaaccagaaaaagaccaagaaagagcgccagaaggccgagcagacaatcgtgcagaaagccaagaaacccgtgcctgtggaacccgaggaagagatcgaagtcgcctccgtggatagcgagcccgagtatcagatgcccgaggtgttcgactacgagcagatgcgcgaggactacggctggtaa

SEQ ID NO: 154 - DNA, 837 bp, Artificial Sequence
  Synthetic
atgacaagcaagcaggcccaggctgttgctcagcagctgggagacatccccgtgaacgacgagaagatccaggccgagatccagcggctgaacagaaagagcttcatccctctggaacaggtgcagatgctgcacgactggctggacggcaagagacagagcagacagtctggcagagtcgtgggcgagagcagaaccggcaagaccatgggctgtgacgcctacagactgcggcacaagcctaagcaagagcccggcagacctcctacagtgcccgtggcctatatccagattcctcaagagtgcggcgccaaagaactgttcggcgtgctgctggaacacctgaagtaccagatgaccaagggcaccgtggccgagattagagacagaaccctgcgggtgctgaaaggctgcggagtggaaatgctgatcatcgacgaggccgaccggctgaagcctaagacatttgccgaggtgcccgacatcttcgacaagctggaaatcgccgtgatcctcgtgggcaccgatagactggatgccgtgatcaagcgggacgaacaggtgtacaaccggttcagagcctgccacagattcggcaagtttagcggcgacgagttcaagaaaatcgtggacatctgggagaagaaggtgctgcagctgcctgtggccagcaacctgagcagcaagacaatgctgaaaaccctgggcgagacaaccggcggctatatcggactgctggacatgatcctgagagagagcgccatcagagccctgaagaaaggcctgagaaaggtggacctggccacactgaaagaagtgaccgaagagtacaagtga

SEQ ID NO: 155 - DNA, 504 bp, Artificial Sequence
  Synthetic
atggaagtgccccagatccagccttggctgttccagatcgaacccctggaaggcgagagcctgtctcacttcctgggcagattcagacgggccaacgatctgacaccaaccggcctgggaaaagccgctggacttggcggagctattgccagatgggagaagttccggttcaaccctccacctagccggcagcaactggaagccctggccaatgtcgtgggagtcgatgccgatagactggcccagatgcttccttctgctggcgtgggcatgaagatggaacccatcagactgtgcgccgcctgctatgccgaatctccctgtcacaagatcgagtggcagttcaaagtgacccggggctgcgccagacacaagatcacactgctgagcgagtgccccaactgcaaggccagattcaaggtgccagctctgtgggtggacggctggtgcaacagatgctttctgagattcgaggaaatggccaagtaccagaaaggcctgtga

SEQ ID NO: 156 - DNA, 500 bp, Artificial Sequence
  Synthetic
tatggtaatagtgcaaatgaagataggaagcacctcgccaacttagatccggaaaacggggtgaagcgatcgcctgttggttgacaactgcacttgtagagcgacaaataatttgtcgttctacaattgtcgattgccaaattatatgaccacttgacaagttaatgtcattcaaaatattatcctcaaaacccttgccaagcaagggttttgttattttaggctcaaaatacccagaaacttattgccaaaatagctgtcctcttttgaaaagttgacgaaatatctgtccttgcttgaaaagggacttgagggaagatttttacagaaattgacaaaataaatgtcctccaagtagtacaatacaactacgtttttattgaacatttatgtaaatatgctggatgatcctgataagggcaatcaagagccagaaacgcatgagatagtgactgagctatcactagatgagcagcatttgctggaaatgattcagaaac

SEQ ID NO: 157 - DNA, 500 bp, Artificial Sequence
  Synthetic
ccgaagtggggcgggttgaaagaccttcatgcaaggatataaaaaattttaggtgggttgaaaggcgcacttcgttcgggattttccctgaccgaaacagtaccaataaatcaaagctattataataacagcttctaatgccaatacaccttgatgactaagtaatttggcaacgcggacaacaacttggcaatacggacaacaatttgtcaacgcagacaaagaatttggcaatcgacaacaataatcgggatgactggattcgaaccagcggccccttcgtcccgaacgaagtgcgctaccaagctgcgctacatcccgttaaaaaatttatacgccttttttagcataacataaataatagtcaatacagaaaagacatctacatctatatatatagatgaatcggaacgggatttgcttgctaggattagatttgtataacattcagtggtaaaagcggattgtgactgtaaaaccagactggttgcgggtaaaag

SEQ ID NO: 158 - DNA, 1743 bp, Artificial Sequence
  Synthetic
atggacgagatgcccatcgtgaagcaggacgacgagagcctgcctgtggaaaacaacgacgatgtggatgagatccaggacgatgagctggaagagacaaacgtgatcttcaccgagctgagcgccgaggccaagctgaagatggatgtgattcagggcctgctggaaccctgcgacagaaagacatacggcgagaagctgagagtggccgccgagaaactgggaaagacagtgcggacagtgcagcggctggtcaagaagtatcagcaggacggcctgagcgccatcgtggaaacccagagaaacgacaagggcagctaccggatcgaccccgagtggcagaaattcatcgtgaacaccttcaaagagggcaacaagggctccaagaagatgacccctgctcaggtggccatgagagtgcaagttcgggctgaacagctgggcctgcagaaatttcccagccacatgaccgtgtaccgggtgctgaaccccatcatcgagcggcaagagcggaagcagaagcagagaaacatcggctggcggggcagcagagtgtcccacaagacaagagatggccagacactggacgtgcggtacagcaatcacgtgtggcagtgcgaccacaccaagctggatgtcatgctggtggaccagtacggcgagcctcttgccagaccatggttcaccaagatcaccgacagctacagccggtgcatcatgggcatccacgtgggctttgatgcccctagctctcaggttgtggccctggcctctagacacgccattctgcctaagcagtacagcgccgagtacaaactgatcagcgactggggcacctacggcgtgcccgagaatctgtttacagacggcggcagagacttcagaagcgagcacctgaagcagatcggcttccagctgggcttcgagtgtcacctgagagacagacctagcgaaggcggcatcgaggaaagaagcttcggaacaatcaataccgagttcctgagcggcttctacggctacctgggcagcaacatccaagagagaagcaagaccgccgaggaagaggcctgtctgacactgagagagctgcatctgctgctcgtgcgctacatcgtggacaactacaaccagaggctggacgcccggaccaaggaccagaccagatttcagagatgggaggccggactgcctgctctgcccaagatggtcaaagagcgcgagctggacatctgcctgatgaagaaaacccggcggagcatctacaaaggcggctatctgagcttcgagaacatcatgtaccggggcgattacctggccgcctatgccggcgagaatatcgtgctgagatacgaccccagagacatcaccaccgtgtgggtgtacagaatcgataagggcaaagaggtgttcctgtccgccgctcatgccctggattgggagacagaacagctgtccctggaagaagccaaggccgcctctagaaaagtgcggagcgtgggcaagaccctgagcaacaagtctatcctggccgagatccacgaccgggacacctttatcaagcagaagaagaagtcccagaaagagcgcaagaaagaggaacaggcccaggtccacgccgtgtacgagcctatcaatctgagcgagacagagcccctggaaaacctgcaagagacacccaagcctgtgaccagaaagccccggatcttcaactacgagcagctgcggcaggactacgacgagtaa

SEQ ID NO: 159 - DNA, 840 bp, Artificial Sequence
  Synthetic
atgaaggacgactactggcagagatgggtgcagaacctgtggggcgacgagcccattcctgaagaactgcagcccgagatcgagagactgctgagcccttctgtggtggaactggaacacatccagaagatccacgactggctggacggcctgagactgtctaagcagtgcggcagaattgtggcccctcctagagccggcaagagcgtgacatgtgacgtgtaccggctgctgaacaagccccagaagagaggcggcaagcgggatattgtgcccgtgctgtatatgcaggtccccggcgattgctctagcggagaactgctggtgctgatcctggaaagcctgaagtacgatgccaccagcggcaagctgaccgacctgagaagaagagtgcagcgcctgctgaaagaaagcaaggtggaaatgctgattatcgacgaggccaacttcctcaagctgaacaccttcagcgagatcgcccggatctacgacctgctgagaatcagcatcgtgctcgtgggcaccgacggcctggacaacctgattaagagagagccctacatccacgaccggttcatcgagtgctacaagctgcccctggtggaaagcgagaagaaattcaccgagctggtcaagatctgggaagaagaggtgctctgcctgcctctgcctagcaacctgaccagaagcgagacactggaacccctgcggagaaagaccggcggaaagatcggactggtggacagagtgctgcggagagcctctattctggccctgagaaagggcctgaagaatatcgacaaagaaaccctgaccgaggtgctggattggttcgagtga

SEQ ID NO: 160 - DNA, 504 bp, Artificial Sequence
  Synthetic
atggaaatcggagccgaggaaccccacatcttcgaggtggaacctctggaaggcgagagcctgtctcacttcctgggcagattcagaagagagaactacctgaccagcagccagctgggcaagctgacaggactgggagctgtggtgtcccggtggaagaagctgtacttcaacccatttccaacgcggcaagagctggaagccctgacctctgtcgtcagagtgaacgccgatagactggccgagatgctgcctcctaagggcgtgaccatgaagcccagacctatcagactgtgcgccgcctgttatgccgaggtgccctgtcacagaatcgagtggcagttcaaggacgtgatgaagtgcgaccggcacaacctgagactgctgaccaagtgcaccaactgcgagacaagcttccccattcctgccgaatgggtgcagggcgagtgccctcactgctttctgccttttgccaccatggccaagcggcagaaacacggctaa

SEQ ID NO: 161 - DNA, 500 bp, Artificial Sequence
  Synthetic
agcaaatattgctatcatatttttttagtttagttatacttccatgagatattcaacaagtatcaacctcaattaaatgcagataaatttaagttgttgaataactaattatttgtcgtcttaacaaaataatgtcgtcaaatataaaactatcaaaaatgttgctacatgagtgtttacaacgttttttattatgtaatgggttagtagtttatttaacactttacttgtcgttgatttaaataataacaaaataaacgtcgtcttttaaaattttacgttttctaaaattttctagtttcataacaaattagctgtcgctttttagcttgaatagtggtattataattttatttagtacatttgcactaaataatacatccttataccgaaaagttgccgcgtccattgaggggtcaactgctttaggaagtttggatgttctcgcacaatagcgagattgtgattactgttttgagtatgaatcaagttttcctatg

SEQ ID NO: 162 - DNA, 500 bp, Artificial Sequence
  Synthetic
agtttcaacaactatcccagctagggatgagttgaaagagcgtcagaaaatatttaacagagggttgaaaggtgcatccgacttgtaagcatatttatgaatattatcagggaagtcatcaaataaagatttagctatatttcctgtacaatagatgtctgcaaacactttatcaaattggttagacgacattaatttgttaacgtttcgcaattagcattatacgacactaatttgttaacagtgacattaatttgttaatagcgacagcaatctgttaacaacgacaaataattagttattcgacataagttaaagccagcagctggatttgaacctgcgaccttccgattacaagtcggatgcactaccactgtgctatgctggcattattaagctcaccgatttatgattataacataagcaaaatatttgtctagaggaagctgcgaaaaaaatttgcttggatgttcgagactggaaggttagtacttcaacct

SEQ ID NO: 163 - DNA, 1707 bp, Artificial Sequence
  Synthetic
atgcaggacgacagatccctggaagtgcccattcctgccgaagtgaacgagatcgtgaccgacttcagcgacgacgccaagctgatgcaagaagtgatccagagcctgctggaaccctgcgacagaatcacctacggccagagacagagagaggccgctgccaagctgggaaagtctgtgcggaccatcagacggctggtcaagaagtgggaagccgagggactgaatgccctgcaggccacacagagaaccgacaagggcaagcaccggatcgaccagaagtggcaagagttcatcatcaagacctacaaagagggcaacaagggcagcaagcggatcacccctcagcaggttgcagttagagtggccgccaaagccgccgagctgggccaagagaagtaccccagctaccggaccgtgtacagagtgctgcagcccatcatcgagaagcaggacaagacacagagcgtgcggagcagaggctggcgaggatctagactgagcgtgaaaaccagagatggccaggacctgagcgtggaatactccaaccacgtgtggcagtgcgaccacaccagagctgatgtgctgctggtggacagagatggacagctgcttggcagaccttggctgaccaccgtgatcgacacctacagcagatgcatcatcggcatcaacctgggctacgacgcccctagttctcaggttgtggctctggccctgagacacgccattctgcctaagcagtacagcagcgagtacaagctgcactgcgagtggggcacatacggcaagcctgagcacttctacaccgacggcggcaaggacttcagaagcaaccatctgcagcagatcggcgtgcagctgggcttcgtgtgtcacctgagagacagacctagcgaaggcggcatcgtggaaagacccttcggcaccttcaacaccaacctgttcagcaccctgcctggctacaccggcagcaatgtgcaagagaggcctgaagaggccgagaaagaggccagcctgacactgagagagctggaacaactgctcgtgcggtacatcgtggacaagtacaaccagagcatcgacgcccggatgggcgatcagaccagatttcagagatgggaggccggactgatcgccgtgccttctccaatcagcgagagagatctggacatctgcctgatgaagcagaccagacggaccatctacagaggcggctacctgcagttcgagaacctgacctacaggggcgacagactggaagtgtatgccggcgagtctgtggtgctgagatacgaggaaaaggacatcaccaccatcctggtgtaccggaaagaaggcgggaaagaagtctttctggcccacgcctacgcacaggatctgcagacagagcagctgagctttgacgaggccaaggccagcagccggaagcttagagatgccggaaaggccgtgtccaacagatccatcctggctgaagtgcggtactccgcttctgctctggctgagctgagagagacattcctggctcagaagaagtccaagaaagagcggcagaaaagcgaacaggtgcagatccaccggaagaaagaactgttccccatcgaggccgaagccaccgagtttgagtctctggtggatgagctggaaaccgagacaatcgaggtgttcgactacgagcagatgagggaagattacggcctgtga

SEQ ID NO: 164 - DNA, 861 bp, Artificial Sequence
  Synthetic
atgaatcaagagaaagaggccaaggctatcgcccagcagctgggaaacatccctctgaacgacgagaagatccaggtggaaatccagcggctgaaccggaagaacttcgtgcccctggaacaagtgaaggccctgcacgattggctggaaagcaagagacaggcccggcagtgctgtagagtgatcggcgaaagcagaaccggcaagaccatggcctgcaacgcctacagactgcggcacaagcctatccagcaactgggccagcctcctatcgtgcccgtggtgtacatccagattcctcaagagtgcagccccaaagaactgttcagcgtggtcatcgagcacctgaagtaccaagtgaccaagggcaccaccgccgagatcagaaacagaaccctgcgggtgctgaaaggctgcggcgtggaaatgctgatcatcgacgaggccgaccggctgaagcctaagacctttgctgacgtgcgggacatcttcgacaacctggaaatctccgtggtgctcgtgggcaccgacagactggacaaagtgatgaccaacgacgagcaagtgtgcaacagattcagcgccagctacagatacggcaagatcagcggcgaggaattcaagcggaccgtgaacatctgggagaaccaggtgctgaagctgcccgtgctgagcaatctgacccagcctaagatgctggaaatcctgagaaacaagacccagggctacatcggcctgatggacatgatcctgagggacgccgctatcagagccctgaagaaaggcatgcccaagatcgacctggacaccctgaaagaagtgacgaacgagtacacagcccctccaaagacacagaagtga

SEQ ID NO: 165 - DNA, 522 bp, Artificial Sequence
  Synthetic
atgaagaccagcgacttccagccttggctgttctgcgtggaacctttcgagggcgagagcatcagccactttctgggcagattcagacgggccaacgagatgacccctaacggactggctaaagccgctggactggaaggcgccattgccagatgggagaagttccggttcaaccctccacctagccggcagcaactggaagctctggctgtgcttgttggcctggaagccgatagactggtgcagatgctgcctcctgttggcgtgggcatgaagatggaacccatcagactgtgcggcgcctgctatgcccagtctccttgtcacaagatcgagtggcagttcaagagcacccagggctgtgtgggcgatagccacagacacaagctgagcctgctgagcgagtgccctaattgcggcgccagattcaagatccccgctctgtgggttgacggctggtgccacagatgctttctgcccttcgaggaaatgaccaagcaccagaaactgatccaggtgtag

SEQ ID NO: 166 - DNA, 500 bp, Artificial Sequence
  Synthetic
ttgcctccaatcgtcagcaacgctcacatccataaagttgctaattttccatcaactcagcttacgacaccgagaatttgcagaggtactaatttgtcgattgccacattatttgtccacttgccaaattattgaccgctaattctaatagcttgctagcctaatctacacaagggttacagctattaaatctcctaaaaatattgaataagctttttgacaaattagttgtccggtttatgaaacttgacaaattctttgtcctctcttgaaagaggcgaaaatcacaacttttgtaaagaattgacacaatctttgtccttaaaaggataatacaaacatgattgtataaaacaattgtgtaaatatgcaggatgatcgctccttggaagtaccaatacctgctgaagtaaatgaaatcgtcactgatttctctgatgatgcaaagctgatgcaggaagtgatccagagtcttttggaaccctgtgatcgcattacct

SEQ ID NO: 167 - DNA, 600 bp, Artificial Sequence
  Synthetic
gtgacaacaaccctcctattacagggtgggttggaagtgattactgtctcgatgtgctgggcgcgatcgcccaatagtttcaacacccctcccagctagaggcgagttgaaagtagtcgtggtacgagaagtggaagaaaaggatcgggctgtttcaactttccttccagctagggcgggttgaaagtcaatccctatattgttggcggtttaagcgcgatcagtgtttcaactccactcctaacaggaggcaggttgaaagatatgacaaagtttgcaaaagcaaaagcttttgaagaaaaaggtgggttgaaaggcgcacttcgttcgggattgttccgacttagtaattacaaagttaatagggtggagttatcatagaaactcacagaaattctgcccggttgattaaaggaagaaccgacctatcaagcggacactaatttgtcaaagcgacatcaatttgacaacgacgacaaataattagtcaatcgacaaattttgtacattcgcacattatatgtcgcaattctcaagccaggtcgtaactgcttttaaagcctgagaactcaatcgtgtaaccatcgtagtctatttacc

SEQ ID NO: 168 - DNA, 1890 bp, Artificial Sequence
  Synthetic
atgagcggctttcacagcatggccgacagagagatcgagttcaccgaggaaagcacccaggacagcgacgccatcctgctggacaacagcaacttcgtggtggaccccagccagatcatcctggccacaagcgacaagcacaagctgaccttcaacctgatccagtggctggctcagagccccaccagaaccgtgaagtccgagagaaagcaggccattgccaacacactgagcgtgtccaccagacaggtggaacggctgctgaagcagtacaacgaggacaagctgagagagacagccggcaccgagagagccgataagggcaagcacagagtgtccgagtactggcaagagttcatcaagaccacctacgagaagtccctgaaggacaagcaccctatcagccccgcctctatcgtgcgggaagtgaagagacacgccatcgtggacctgggactgaagcctggcgattatccacaccaggccaccgtgtaccggatcctggaacctctgattgcccagcacaagagaaagaccagagtgcggaatcctggcagcggcagctggatgacagtggtcacaagagatggccagctgctgagagccgacttcagcaaccagatcattcagtgcgaccacaccaagctggacatccggatcgtggacatccacggcgatctgctgagcgaaagaccttggctgaccaccgtggtggatacctacagctcttgcgtgctgggcttcagactgtggatcaagcagcctggcagcaccgaagttgccctggctctgagacatgccattctgcccaagcagtaccccgacgactaccagctgaacaagagctggaacgtgtacggcaaccccttccagtacttcttcaccgacggcggcaaggacttcagaagcaagcacctgaaggccatcggcaagaaactgggcttccagtgcgagctgagggacagacctcctgaaggcggcatcgtggaacggatcttcaagaccatcaacacccaggtgctgaaggacctgcctggctacacaggcgccaatgtgcaagagaggcctgagaacgccgagaaagaggcctgtctgaccatccaggacctggacaagatcctggcctccttcttctgcgacatctacaaccacgagccgtatcctaaagagccccgggacaccagattcgagcggtggtttaaaggcatgggcgagaagctgcccgagcggctggatgagagagagctggatatctgcctgatgaaagaaacccagagagtggtgcaggcccacggcagcatccagttcgagaacctgatctacagaggcgagtctctgaaggcccacaagggcgagtacgtgaccctgagatacgaccccgaccacatcctgacactgttcgtgtacagctgcgagacagacgacaacctggaagagttcctgggctatgcccacgccgtgaacatggacacacacgacctgagcctggaagaactgaaaaccctgaacaaagagcggagcaaggcccggaaagagcacttcaattacgacgccctgctggccctgggcaagagaaaagaactggtggacgagcggaaggccgacaagaaagagaagaggcacagcgagcagaagcggctgagaagcgccagcaagaaggacagcaacatcatcgagctgcggaagtcccgggtgtccaagagcctgagaaagcaagagactcaagagatcctgcctgagagagtgtccagggaagagatcaagtttgagaagatcgaactcgagccccaagaaaccctgagcgctagccccaagcctaatcctcaagaggaacagagacacaagctggtgctgagcaagaggcagaagaacctgaagaacatctggtga

SEQ ID NO: 169 - DNA, 855 bp, Artificial Sequence
  Synthetic
atggccagatctcagctggccaaccagcctatcgtggaagtgctggctcctcagctggacctgaatgcccagatcgccaaggccatcgacatcgaggaaatcttccggaactgcttcatcaccaccgaccgggtgtccgagtgcttcagatggctggacgagctgcggatcctgaagcagtgcggcagaatcatcggccccagaaacgtgggcaagagcagagctgccctgcactacagagatgaggacaagaaacggatcagctacgtgaaggcttggagcgccagcagcagcaagagaatcttcagccagattctgaaggacatcaaccacgccgctcctaccggcaagagacaggatctcagacctagactggccggcagcctggaactgttcggactggaactggtcatcatcgacaacgccgacaacctgcagaaagaggccctgatcgacctcaagcagctgttcgaggaatgccacgtgccaatcgtgctgatcggcggcaaagagctggacaacattctgcaggactgcgacctgctgaccaactttcccacactgtacgagttcgagcggctggaatacgacgacttcagaaagaccctgagcaccatcgagctggatatcctgagcctgcctgagtctagccatctggccgagggcaacatcttcgagatcctggccgtgtctaccagcggcaggatgggcatcctggtcaagatcctgacaaaggccgtgctgcacagcctgaagaacggcttcggaagagtggacgagagcatcctggaaaagatcgccagcagatacggcaccaaatacgtgcccctggaaaaccggaaccggaacgagtaa

SEQ ID NO: 170 - DNA, 555 bp, Artificial Sequence
  Synthetic
atggtgcagaatatgttcctgagcaagaccgagacaggcatgaacgaggacgacgagatcagacccaagctgggctacgtggaaccttacgagggcgagagcatcagccactacctgggcagactgcggagattcaaggccaacagcctgcctagcggctacagcctgggaaagattgctggactgggcgccgtgaccaccagatgggagaagctgtacttcaacccatttcctaaccggcaagagctggaagccctggcctctgttgtgggagtgtctgccgagcggttcatcgagatgctgcctccaaagggcgtgaccatgaagcccagacctatcagactgtgcgccgcctgttatgccgaggtgccctgtcacagaatcgactggcagttcaaggacaagatgaagtgcgaccggcacaacctgcggctgctgaccaagtgcaccaactgcgagacaccctttcctatacctgccgattgggcccagggcgagtgtcctcactgtagcctgagcttcgccaagatggtcaagcggcagaaactgcggtga

SEQ ID NO: 171 - DNA, 600 bp, Artificial Sequence
  Synthetic
tttattttcttgtatttataagcacataagtaaaaataagtattctatgtatacctagtgatataagaatacacatatttaacaagatatatgaataaaattttgataaattttctgtaaaaacagtgaatatacttaatttttaattaaattttccaaattcaggactttcaagatattgacatttctgtggttagtattataccgtcccaatattcagattccaaaacattagtttctcttccattcgcaaattgaggaagcacagacggcacaaaccgataattatcagagtcaaaaatcgacaaaaggatgattgaaaagtgtacattcgcaaattaaatgtcgcttttcgcaaacaatgtcgcaactgtattgaatggctgaaagctacatcgtgtaaatattataggtcatttatctctaagacaggctaatttgcttgtttcgcatattatatgtcgcataatcacgtttttgcaaattaaatgtcgtttgttaaagttggtgacttttgcaaattaaatgtcgtattctttatgaatatatggtacattagtaccttaattactcatgagtgggtttcactctatggcagac

SEQ ID NO: 172 - DNA, 900 bp, Artificial Sequence
  Synthetic
agtttcaacgaccatcccggctaggggtgggttgaaagacttagataatcaatcctagaaaaaacgctcttagtttatccgtctttgcgctacaaaaatcttgtcaaatggggtagggttgaaaggtgcatccgacttgtaagcgtattaaaccttaaaaacataaaacaaaaaattaaaacttatttaattctgattttttatatgtaagaattaggttctgcacaaccatcaattcacttgttgaagtaatattattgtgttaacacttgcttgtaagcaacactgtaacaatctagaaggaaaaaacgacattaatgtgcgaaaacctagcataactaaattgattataaaaaatagccgaagcgacatcaatttgagaaaaccgacactaaattgcgaaaagcgacatttaatttgcgaatgtacagattgaaaagccagcagtcggatttgaaccgacgaccttccgattacaagtcggatgcactaccactgtgctatgctggcaaattaggtgatgcgtttgaatcattcaccgatttctaattatagcacaacaaaattatttgtctagtcctgatttgatttttctctagggttgatggttgactggagtttcttctccctccacttcccccacttcccccactccccagcgttgccaagatgtagaaattctcaaaaatcagtgatggcaaaacctcacaaacttgataaattaataggcatagcaaaatcagctagagcctagacttgaagaaaaaacattgagtacagttgccaaactgtatttttttttgactagcagtatagaattgttctttacagattcaaaagcatggcaacattgtttggacgcgatttgttaagtctggcggacttgaatcctacagaact

SEQ ID NO: 173 - DNA, 1668 bp, Artificial Sequence
  Synthetic
atgaacaccggcaatcaagaggcccacgccgtgatcaccgacttcagcgaggaagaacggctgaagctggaagtgatccagagcctgatggaaccctgcgaccacgccacatatggccagaagctgaaagacgccgctcagaagctgggcaagagcaagagaaccgtgcagagactggtgcagcagtgggaagaaatgggactcgccgccgtgacatctaaggccagagccgataagggcaagcaccggatctctcaagagtggcaggacttcatcgtgaaaacctaccggctgggcaacaagggcagcaagcggatgagcagaaaacaggtggccctgagagtgcaggctagagccgctgagctgggcgagaagatgtaccccaacgagcggaccgtgtacagagtgctgcagcctatcatcgaggcccaagaacagaaaaagagcgtgcggagcgctggctggcggggagatagactgagcgtgaaaacacggaccggcaacgacctggtggtcgagtacaccaatcaagtgtggcagtgcgaccacacctgggtcgacgtgctggtggttgacgtggaaggcaacatcatcggcagaccctggctgaccaccgtgatcgacacctacagcagatgcatcctgggcatcagactgggcttcgatgcccctagttctcaggtggtggctctggctctgagacacgccatgctgcctaagcagtaccctcctacattcggcctgcagtgcgagtggggcacatacggcaagcccgagtacttctacaccgacggcggcaaggacttcagaagcgagcacctgagacagatcggcatccagctggggtttacctgcgagctgagagacagaccttctgaaggcggagccgtggaaagacctttcggcaccctgaacaccgagctgttctctaccctgcctggctacaccggcagcaacatccaagaaagacccgaggacgccgagaaggacgccagaatgacactgagagatctggaacagctgatcgtgcgctacctggtggacaactacaaccagcggctggacaagagaatgggcgaccagaccagataccagagatgggagtctggcctgctggccacaccagctctgctgtctgagagagagctggacatctgcctgatgaagcagaccaaccggtccatctacagagagggctacatcagattcgagaacctcatgtacaagggcgagtacctggccggctatgtgggcgaaagagtggtgctgagatacgaccccagagacatcaccacagtgctggtgtaccggcgcgagaagtcccaagaagtgttcctggccagagcttacgcccaggacctggaaacagagcagctgaccctggaagatgccaaggccatcaacaagaagatccgcgagaagggcaagaccatcagcaaccgcagcatcctggacgaagtgcgggacagagatctgttcgtgtccaagaaaaagacgaagaaagagcgccagaaagaggaacagacccggctgttcacccctgtgacaacccctaacagcaagcaagaaaccgaggaagaggaaatcgagcccgtcgagaagatcgacgagctgccccaggtggaaatcctggactacgatgagctgaacgacgactacggctggtga

SEQ ID NO: 174 - DNA, 855 bp, Artificial Sequence
  Synthetic
atgatggccagcgccgagtctaaggccaaagctgaagctgtggctcagcagctgggcaacttcgagaaaaccgaagaggacctggccaaagagatccagcggctgcggagaagaaacgtggtgcagctggaacaagtgaagcagctgcacaactggctggaaggcaagcggagaagcagacagtgctgtagagtcgtgggcgagagcagaaccggcaagaccatcggctgcaacgcctacagactgcggcacaagcccatccaagagacaggcaagcctcctatcgtgcccgtggtgtacattgagcctccacaggattgcggcagcatcgacctgttcagagccatcatcgagtacctgaagtacaaggtgcagagccgcgagaaagtgcgcgagctgagatccagagccatgaaggtgctggaacggtgccaggtggaaaccctgatcatcgacgaggccgacagactgaagcccaagacctttgccgacgtgcgggacatcttcgacaagcggaatatcagcgtggtgctcgtgggcaccgacaggctggacaatgtgatcaagcgggacgaacaggtgcacaacagattccgggcctgctacagattcggcaagctgaccggcaccgagttcgagcaggttgtgaagatctgggagagagacatcctgcggctgcccattcctagcaacctgcacgccaagaacatgctgaagatcctcggacaggccaccggcggctatatcggactgctggatatgatcctgcgggaaaccgccgtcagagccctggaaaaaggcctgggcaagatcaacctggaaacactgaaagaggtggccgaagagtacagctga

SEQ ID NO: 175 - DNA, 504 bp, Artificial Sequence
  Synthetic
atgaacgactgggagatccagccttggctgttcgtggtggaaccttacgagggcgagagcctgtctcacttcctgggcagattcagaagagagaacgatctgacccctgccggcctgggaagagaggctgaaattggagccgtggtgtccagatgggagaagttccggctgatcccatttcctagccagagagagctggaaaagctggcccaggtggtgcaagtggatgccgctagactgagagtgatgctgcctcctgatggcgtgggcatgaagatgacccctatcagactgtgcggcgcctgctacagagaagtgcggtgccacagaatggaatggcagtacaagaccagcgaccgctgcgacaagcaccctctgagactgctgagcgagtgccctaattgcggcgccagatttcccattccaagcctgtggcaggatggctggtgcacccggtgctttaccacctttggagagatggccgagagccagaaacctctgtga

SEQ ID NO: 176 - DNA, 500 bp, Artificial Sequence
  Synthetic
ttggcgtggtcgatcagttctgaactgtctgcccccacactgcccccaaaatcttgattttaatgacattttttttccaattttagggtgtgggtgtcgattgactcattaactgacatcttgacaaattatttgtcattgctatagacaagcctgcaacccttactatacataaggttgtgggctttttgcattggaaatttactcaaaagcaaaattgacaaattaggtgtcgtatattaggagtttgccaaaatatgtgtcgcttttcatttagtccagattttctggctttttgacacattctgtgtcgctcagggtaaaataacaacatgtttgtattaaacacatttgttgtaaatgaatacaggtaatcaagaagctcatgcagttatcactgacttctctgaggaggagaggttaaaactagaagttatccagagtttgatggaaccctgtgatcacgctacctatggacaaaagttaaaagatgcggctca

SEQ ID NO: 177 - DNA, 500 bp, Artificial Sequence
  Synthetic
gttgctgaaaccatcccaaggtgggattaggttgaaagagtaatacaagaattgggtggattgaaagcaagtcccaccgtcccctactttagtgcaatgcaagattacacaacaaacttgctctgaatgtatggaaggttcgtaaaagtggtgacaaataatttgtcaagatgacatcaatttgacaacgatgacaaataattagtcaatcgacatgtgggcaacaccgtcagaacaactcagaaaactctgaaacgatgggggtggtgggacttgaacccacacgtctttttacggacaacggattttaagtccgcagcgtctaccattccgccacacccccaagagcagtgacagggttctagtttagcagcaaatggcggccactgcatggaacagaaccctcagaaaatctaatcaatctgcctcttgcgctccgatgggttgaattgtttatgatgggagggcgtttgctactgcgttggtgactgccaatatcg

SEQ ID NO: 178 - DNA, 1686 bp, Artificial Sequence
  Synthetic
atgctggaaacccaggacaacaagcccaacgacgacgaagtgaagggcagcgacatcatcaccgaactgtctgccggcgacaaagagctgctggaactgatccagaagctgctcgagccctgcgacagaaccacatacggcgagagacagagagaggtggccgccaagctgggaaagtctgtgcggacagttagacggctggtcaagaagtgggaagaacagggacttgccggcctgcagacaacccagagagccgataagggcaagcaccggatcgatagccagtggcagaagttcatcatcaacacctacaaagagggcaacaagggcagcaagcggatcacccctcagcaggttgccattagagtgcaggccaaagccgctgagctgggcgacgagaattaccccagctaccggaccgtgtacagagtgctgcagcccatcatcgaggaacaagagcagaaggccggcgtcagaaacagaggctggcgaggctctagactgagcctgaaaaccagagatggcctggacctgagcgtggaatactccaaccacatctggcagtgcgaccacaccagagccgatctgctgctggttgatcagcacggcgaactgctggccagaccttgggtcaccacagtgatcgacacctacagccggtgcatcatcggcatcaacctgggctttgatgcccctagctctcaggtggtggctctggctctgagacacgccatcctgcctaagaagtacggcagcgagtacggcctgcacgaggaatggggcacatatggcaagcccgagcacttctttaccgacggcggcaaggacttcagaagcaaccatctgcagcagattggcgtgcagctgggcttcgcctgccatctgagagatagacctagcgaaggcggcatcgtggaaagacctttcggcaccctgaacaccgacctgttttctgccctgcctggctacaccggcagcaacgtgcaagaaagacctgaggaagccgagaaagaggcctgtctgaccctgagagagctggaaagactgatcgtgcggtacatcgtggacaagtacaaccagagcatcgacgccagactgggcgatcagacccggtatcagagatgggaggccggactgattgtggcccctagcctgatcagcgaagaggacctgagaatctgcctgatgaagcagacccggcggagcatctacagaggcggctatctgcagttcgagaacctgacctaccggggcgaaaatctggccggatatgccggcgaaagcgtggtgctgagattcgaccccaaggacatcaccaccatcctggtgtacagacagaccggcagccaagaagagttcctggccagagcctacgctcaggacctggaaaccgaagaactgtccctggatgaggccaaggccatgagcagaagaatccggcaggccggaaaagagatcagcaacagatccatcctggccgaagtgcgggaccgcgagacattcgtgaagcagaaaaagaccaagaaagagcgccagaaagaggaacaggtcgtcgtcgagaaagtgaagaaacccgtgatcgtggaacccgaagagatcgaggtggccagcgtggaaacagtgtccgagcctgatatgcccgaggtgttcgactacgagcagatgcgcgaggactacggctggtaa

SEQ ID NO: 179 - DNA, 837 bp, Artificial Sequence
  Synthetic
atgacatctcagcaggccgagtctgtggcccaagagctgggagacatccctcagaacgacgagaagctgcaggccgaaatccagcggctgaacagaaagagcttcatccctctggaacaagtgaagatgctgcacgactggctggacggcaagagacagagcagacagtctggcagagtgctgggcgagagcagaaccggcaagaccatgggctgtgacgcctacagactgcggcacaagcctaagcaagagcccggcaaacctcctacagtgcccgtggcctacatccagattcctcaagagtgcagcgccaaagagctgttcgccgccatcatcgagcacctgaagtaccagatgaccaagggcaccgtggccgagatcagagacagaaccctgagagtgctgaaaggctgcggcgtggaaatgctgatcatcgacgaggccgaccggttcaagcccaagacctttgctgaagtgcgggacatcttcgacaagctggaaatcgccgtgatcctcgtgggcaccgatagactggatgccgtgatcaagcgggacgaacaggtgtacaaccggttcagggcctgccacagatttggcaagttcagcggcgaggacttcaagcggaccgtggaaatctgggagaaacaggtgctgaagctgcctgtggccagcaacctgtctagcaaggccatgctgaaaaccctgggcgaagccacaggcggctatatcggactgctggacatgatcctgagagagagcgccattcgggccctgaagaagggcctgtctaagatcgacctggaaaccctgaaagaagtgaccgccgagtacaagtga

SEQ ID NO: 180 - DNA, 504 bp, Artificial Sequence
  Synthetic
atggaagtgggcgagatcaacccatggctgttccaggtggaaccctatcctggcgagagcctgtctcacttcctgggcagattcagacgggccaacgatctgaccacaaccggcctgggaaaagccgctggtgttggcggagctgtggccagatgggagaagttcagattcaaccctccacctagccggcagcagctggaagccgtggctaaagtcgtgggagtcgacgccgatagactggaacagatgcttcctcctgccggcgtgggcatgaacctggaacctattagactgtgcgccgcctgctacgtggaaagcccttgtcacagaatcgagtggcagttcaaagtgacccagggctgccagcaccaccacctgtctctgctgagcgagtgccctaattgcggcgccagattcaaggtgccagctctgtgggttgacggctggtgccagagatgctttctgccctttggcgagatggtggaacaccagaagggcatctga

SEQ ID NO: 181 - DNA, 600 bp, Artificial Sequence
  Synthetic
atcgctctttccctatcaaattatactagaaaaagtgaatcttcctgtgctgataacaacaacataaactgcttcccctgacctgaaggtttcaacggttcctagaagaccaagaaattaataaaaatagtaaaaatcaacattctagtgccttgtttaccatgcatagtggtcgtatcgcttggcaggacgaacaaggcaagtgagaaccctggaatattattttgtcgcttgtcaaattaaatgaccacttgacaaattaatgtccacaaatatattaaccgctaaacccttacacagtgagggttttaatattttagcctatttttagccagtcagatactaattgacaaaataactgtccgaacttgaatatttgacaaattaattgtcctgtattgaaaatccctatttttccaatttttccagacttgacaaattaattgtccttttatacagtacaatacaactatgtttgtaataaacatatatgctagaaactcaagataataaacccaatgatgatgaggtaaaaggtagtgacattatcaccgaactatccgcaggtgataaggaactattggaactaatccaaaaatt

SEQ ID NO: 182 - DNA, 500 bp, Artificial Sequence
  Synthetic
gtttcaacacccctcccgaagtggggcgggttgaaagtctaaattttgtcttctgtttcagagcctaataaattaaaacactgttataaaattaaggtgggttgaaaggagtgctgcgatcgtacacaacataagttatgtgtattacctggagataaaatttaaggacaaataatttggcagcacggacagcaatttggcaagacggacaacaatttgtcaacgcggacaaattatttggcaagtgacaacaatttataatggagaataggagactcgaacccctgacctctgcggtgcgatcgcagcactctaccaactgagctaattccccttgtgagtgcagagtagcaaactctgacagacgtactctatcttaacactcaggcacggcagattttacatctttttgcaaatacacctgctgcacccgttccaattccaaatcagtcaaataatctacagtccagttggcttgacgctgaagcatatgaaaaggg

SEQ ID NO: 183 - DNA, 1698 bp, Artificial Sequence
  Synthetic
atgcccgacaaagagtttggactgaccggcgagctgacccaagtgacagaagccatcctgctgggcgagagcaacttcgtggtggaccctctgcacatcatcctggaaagcagcgacagccagaagctgaagttcaacctgatccagtggctggccgagtctcccaacagacagatcaagagccagcggaagcaggccgtggccgagacactgagcatcagcacaagacaggtggaacggctgctgaaagagtacaacgaggaccggctgaacgagacagctggcgtgcagagaagcgacaagggcaagcacagagtgtccgagtactggcagcagtacatcaagaccatctacgagaacagcctgaaagagaagcaccctatcagccccgcctctgtcgtgcgggaagtgaagagacacgccatcgtggatctgggactcgagcagggcgattaccctcatcctgccaccgtgtaccggatcctgaatcctctgatcgagcagcagcagcggaagaagaagatcagaaaccctggcagcggcagctggctgaccgtggaaacaagagatggcaagcagctgaaggccgagttcagcaaccagatcatccagtgcgaccacaccgagctggacatccggatcgtggacaacaatggcgtgctgctgcccgaaagaccttggctgacaaccgtggtggataccttcagcagctacgtgctgggctttcacctgtggatcaagcagcctggaagcgccgaagttgccctggctctgagacacagcatcctgcctaagcagtaccccaacgactacgagctgagcaagccttggggctacggccctccattccagtactttttcaccgacggcggcaaggacttcagatccaagcacctgaaagccatcggcaagaaactgggatttcagtgcgagctgcgggacagacctaatcaaggcggcatcgtggaacggatctttaagaccatcaacacccaggtgctgaaggacctgcctggctacacaggcagcaacgtgcaagagaggcctgagaacgccgagaaagaggcctgtctgaccatccaggacatcgacaaagtgctggccggcttcttctgcgacatctacaaccacgagccttatcctaaggaccccagagacaccagattcgagagatgggtcaaaggcatgggcagaaagctgcccgagcctctggatgagagagagctggatatctgcctgatgaaggaagcccagagagtcgttcaggcccacggcagcatccagttcgagaacctgatctacagaggcgagagcctgaaggcctacaagggcgagtacgtgaccctgagatacgaccccgatcacatcctgacagtgtacgtgtacagctgcgagagcgacgacaacctggaagagtttctgggctacgcccacgccatcaacatggacacacacgacctgtctctggaagaactgaaggccctgaacaaagagcggagcaaggcccggaaagagcacttcaattacgacgccctgctggccctgggcaagagaaatgaactcgtgggcaaacgcaaagaggacaagaaagagaaacggcggagcgagcagaagagactgagatccaccagcaagaaaaactccaacgtggtggaactgagaaagagcagagccgccagcagctccaagaagagatga

SEQ ID NO: 184 - DNA, 855 bp, Artificial Sequence
  Synthetic
atggccagatctcagctggccacacagcccatcgttgaagccctggctcctcacctgtctctgaaggcccagatcgccaagaccatcgacatcgaggaaatcttccggacctgcttcatcaccaccgacagagccagcgagtgcttcagatggctggacgagctgcggatcctgaagcagtgcggcagaatcatcggccccagaaacgtgggcaagagcagagctgccctgcactacagagatgaggacaagaaacgggtgtcctacgtgaaggcttggagcgccagcagcagcaagagactgttcagccagattctgaaggacatcaaccacgccgctcctaccggcaagagacaggatctcagacctagactggccggcagcctggaactgttcggactggaactggtcatcatcgacaacgccgacaacctgcagaaagaggccctgctggacctcaagcagctgttcgaggaatgccacgtgccaatcgtgctcgtcggcggaaaagagctggacgacattctgcaggactgcgacctgctgaccaactttcccacactgtacgagttcgagcggctggaatacgacgacttcaagaaaaccctgagcaccatcgagctggatatcatcagcctgcctgagagcagcaacctgagcgagggcaacatcttcgagatcctggctggctctacaggcggcaggatgggcatcctggtcaagatcctgacaaaggccgtgctgcacagcctgaagaacggcttctctaaggtggacgagagcatcctggaaaagatcgccagcagatacgggaccaagtacatccctctggaaaaccggaaccggaacgagtga

SEQ ID NO: 185 - DNA, 564 bp, Artificial Sequence
  Synthetic
atgctggtggttatggtgcagaacatcttcctgagcaagaccgagatcggcatgaacgaggacgagatcagacccaagctgggctacgtggaaccttacgagggcgagagcatcagccactacctgggcagactgcggagattcaaggccaactctctgcccagcgcctacagcctgggaaagattgctgatctgggcgccgtgacaggcagatgggagaagctgtacttcaaccccagacctacacagcaagagctggaagccctggcctctgtggtggccgtgaatgccgatagactgaccgagatgctgcctcctaccggcatgaccctgaagcctagacctatcaagctgtgcgccgcctgctatgccgaggaaccctatcacagaatcgagtggcagtacaaagaacagcagaaatgcgtgcggcacaacctgcggctgctgaccaagtgcatcaactgcgagacaccctttcctatacctgccgactgggtggaaggcgagtgtcctcactgtagcctgagcttcgccaagatggccaagcggcagcggagaaactaa

SEQ ID NO: 186 - DNA, 500 bp, Artificial Sequence
  Synthetic
tgaagcaaaattaaagattgacttttcgagcctttgcgcgaaacaaaattcattcccttaatcagcaacgccaattaaaaaaatcatctctagaaagagattgacaaataatgtgtcgccacggacaaataatttgtacattcgcacgttatatgtcgcaatttgcaaataacgacatgagcgtttttatcatctaaaacgcttattttataaagctttcagaacatttttcactaaaaatataacattcctaaattcgcatattgaatgtcgcaaacactaatgttcgcaaattaacgccgttggtctaaattttgttaccttgcaaattcaatgtcgcattttcttaattcaatggtacattgatactatcaataactacattctcctcacttaaatgccagacaaagaatttggattaactggagaattgacacaagttacggaagctattttgcttggtgaaagtaattttgtggtcgatccattacacattattc

SEQ ID NO: 187 - DNA, 500 bp, Artificial Sequence
  Synthetic
agtttcaacaagcatcccggctaagggtgggttgaaaggaaatttttgttgttactaggtgagatatttgtttcaattaggagggttgaaaggcgcacttcgttcgggaatattctgaaatttttagcatattctacaagtgtagtgggatcactccaccacatcacagttgcgacattaatttgcgaaaaatcagtataattaaattgactctaaaaataagtcaaagcgacgctaatttgcaaaaaaacgacattaatttgcatattgcgacacataatctgcgaatgtacatcgacacatgcacatcgggatgactggattcgaaccagcggccccttcgtcccgaacgaagtgcgctaccaagctgcgctacatcccgctaaaaaaaagacaatatttttatgattgtaccataaatatctgaaaaaaggaaatataaaaatcagctgctactgaactgtatagatgaccgaacaaggcaaaagtaaaaatttaaa

SEQ ID NO: 188 - DNA, 1719 bp, Artificial Sequence
  Synthetic
atgaagaacgccaactctccacctagcaccagcagcgtgaacaaccctctggaaaaagagaacaacgtcatccccagcgagctgagcgacgaggcccaactgaagctggaagtgatccagacactgctgaagccctgcgacagaaagacctacggccagagactgcaagaggccgccgagaagctgggcaagagcaagagaacagtgcagcggctggtcaagaagtgggaagagaagggactgcaggccattgccgccaccgacagatctgataagggcagcttccggatcgaggaacagctgcaagagttcatcatcaagacctacaagaacggcaacaagggcagcagaagagtgacccggaaacaggtgtacctgaaggccaaggccaaagccgaggaactgggcatcaatcctccaagccacatgaccgtgtaccggatcctgcagcctctgatcgagaagcaagaaaagaagaagtccatcagaagccccggctggcggggatctcagctgtctgtgaaaacaagagccggccaggacctgagcgtggaatactccaatcacgtgtggcagtgcgatcacaccctggccgatatcctgctggtggatcagtatggcgagctgctgggtagaccttggctgaccacagtgatcgacacctacagccggtgcatcatcggcatcaacctgggcttcaatgcccctagcagccagattgtggccctggctctgagacacgccatcctgcctaagagatacacccctgactaccagctgtccgaggaatggggcacatacggcaagcccgagcacttctacaccgacagcggcaaggatttcagcagccaccacatccagcagatcagcgtgcagctgggcttcgtgtgccacttcagagacagacctagcgaaggcggcatcgtggaaagacccttcaagaccctgaacctggaattcttcagcaccctgcctggctacaccggcagcaatgtgcaagaaagacccgaggatgccgagaaagaggcctgtctgacactgcggcagctggaacagaaactcgtgcggtacatcgtggacaactacaaccagcggatcgacgccagaatgggcgaccagaccagattccagagatgggagtctggcctgatcgctagccccgatgtgatcagcgagagagagctggacatctgcctgatgaagcagaccagacggaaggtgcagagaggcggctacctgcagttcgagaacctgatgtaccggggcgagaatctggccggatatgccggcgagtctgtgatcctgagattcgaccccagagatgtgaccaccgtgctggcctaccagcaagagtccaatcaagaggtgttcctgaccagagcctacgccatcgacctggaaaccgagcagatgagcctggacgaagccaaggcctcctccaagagagttagagaggccggcaagaccatcagcaaccggtctatcctgagcgagatcagagccgccgagggatctgcctatgccgacagacagatcttccctaaggccaagaagtctaagaaagagcgctaccaagaggaacagaaggccatcaccagcaagcccctggaacaggtggaaagcgagctggaagaaaccgacgtgtccagcagcagctccgagacatctcaggtggaagtgttcgactacgaaacactccaagaggactacggcttctga

SEQ ID NO: 189 - DNA, 837 bp, Artificial Sequence
  Synthetic
atgaccatccaagaggcccaggctgttgctcagcagctgggcgatatcaagctgaccagcgagaagctgcaggccgagatccagcggctgaacagaaagaccgtggtcaccctgtctcacgtggaagccctgcacaattggctggaaggcaagagacaggccaagcagagctgtagagtcgtgggcgagagcagaaccggcaagacaatcgcctgcaacgcctaccggctgcggcacaagcctattcagacacctggcaagcctccaatcgtgcccgtggtgtacatccaagtgacccaagagtgcggcgccaaggatctgtttggcgccatcatcgagcacctgaagtaccagatgaccaagggcaccgtggccgagattcggcagagaacctttaaggtgctgcagagatgcggcgtggaaatgctgatcatcgacgaggccgaccggctgaagcctaagacctttgctgaagtgcgggacatcttcgacaagctgaatatcgccgtggtgctcgtgggcaccgatagactggatgccgtgatcaagcgggacgaacaggtgtacaaccggttcagagcctgccacagatttggcaaactggccggcgacgagttcagccagacagtggatatctgggagagacaggtgctgaagctgcccgtggccagcaatctgagcagcaagcggatgctgaagatcctcggacaggccacaggcggctatctgggactgctggacatgatcctgagagagagcgccattcgggccctgaagaagggcctgcagaagatcgacctggaaaccctgaaagaagtgaccgaggaataccggtga

SEQ ID NO: 190 - DNA, 402 bp, Artificial Sequence
  Synthetic
atggaaagcaaagaaatccagccgtggtggttcctggtgcagcctcttgccggcgagagcatctctcactttctgggcagattccggcgcgagaacgagctgaccgtgaccatgatgggcaagctgacaggactcggcggagccattgccagatgggagaagttcagattcatccccgctcctaccgaggaagaactgacagccctgtctgaggtggtgcaggtcgaggtggaaagactgtggcagatgttccctccaaaaggcgtgggcatgaagcacagacccatcagactgtgcgccgcctgctacgacgaggaaagatgtcacaagatcggctggctggtggaagatgacagcgtgctgctgaaggcctgggtcaacatcgtcgtgggaatgagctga

SEQ ID NO: 191 - DNA, 498 bp, Artificial Sequence
  Synthetic
aacttcatcacgtgctttcttccatccaagctgaaaaccatcatgatatttgacttgaaaaacccattcttttggtacgtcctcaattacattgataggtgtacagtaactaattgtttgtcgtcttaacaaaatagtgtcgtcaaaacttttaaccttcaaacttttatataatctacgttatagactgatcataacatcaatcttttataaaagtcattattcatcttattaacaaattgactgtcatttacccgaatggcactttttttatggactgaagcaatattaacaaattaattgtctccaaacttcaaggattgtgatacactcatattaaataaacaattatgtaataatcagacattgttgttcattatgaaaaatgcaaactcaccaccctctacatcatcagttaataatcccttagagaaagaaaataatgttatcccctctgagttatctgatgaagcacaattaaagcttgaggttattcaa

SEQ ID NO: 192 - DNA, 500 bp, Artificial Sequence
  Synthetic
cagcgtcacaatctattttggttaatgagatggattgaaagattttttaccatcgtctaggattagtctcggtaataggcacacgacaaataatatgttcttaatgacacccaattcgttaaagcgacaataatttgttaccgatgacaaataatcagttactgtacaaaactttaaattacaagttaatattatacacactataaaaaaatatggacgtaactggactcgaaccagtgaccccatcgatgtcaacgatgtactctaaccaactgagctatacgtccgcacaagtctttactataacacaagatttaccaaaaacgcaaataaacaaacaaacttacatagatttccttaagagatgggggagtcggggtcattggggagtgtaataaaaggacaacccttgattattgatcattatatgtacgagaaactgacaccccccaccactggttctaaaatcacttttaaagacggtaaacccattgttccta

SEQ ID NO: 193 - DNA, 1641 bp, Artificial Sequence
  Synthetic
atggaactggtcaaccccgacgacctgaacagcgtggaaagccggctgaagctggaaatcatcgagaagctgagcgagccctgcgacagaaagacctacggcgagagactgagaagcgccgctcagcagctgaagtgttctgtgcggacagtgcagcggctgatgaagaagtgggaagaagaaggcctggccgctctgatcgacagcggcagaatcgataagggcaagcccagaatcgccgaggactggcagcagttcatcaagaaggtgtacagcaacgacaagtgcacccctgctcaggtgttcaccaaagtgcggaacaaggccagacaagagggcctgaaggactaccccagccacatgaccgtgtaccggatcctgagactggtcaaagaggccaaagagaaagaggaatccatccggaacctcggctggaagggatctagactggccctgaaaaccagagatggcgaggtgctggaaattgactacagcaatcaagtgtggcagtgcgaccacaccagagccgatatcctgctggtggataagtacggccaccagatgggcagaccttggctgaccacagtgatcgacacctacagcagagccatcgtgggcatcaacctgggctacgatgccccttctagcagcgttgtggctctggctctgcggaacgccatcatgcctaagcagtacggcgtcgagtacaagctgtacgccgattggcctacctgcggcacacctgatcacctgtttaccgacggcggcaaggacttcagaagcaaccacctgagacagatcggcctgcagctgggcttcatctgtcacctgagagacagacctagcgaaggcggaatcgtggaaagacccttcggaacaatcaatacccagttcctgagcaccctgcctggctacacaggcagcaacgtgcaggatagacctcctgaggccgaagccgaagcctgtctgacactgcaagagctggaaaagctgctggtcgcctacatcgtgaatacctacaaccagcggctggacgccagaatgggcgatcagaccagaattcagagatgggaagccggcctgctgaagcagcctagagtgatccctgagcacgagctgcacatctgcctgatgcggcagaccagacggaccatctacagaggcggctacctgcagttcgagaacctggcctatagaggcgaagccctggctgaacatgccggcgagaatatcgtgctgagatacgaccccagaaatatcgcccaggtgctggtgtacagacacgaccccgacagagaagtgtacctgggagttgcccaggctctggaattcgagggcgaagtgctggccctggatgatgccaaggctcacagcagacggatccgcgaggatggaaaggccgtgtccaatgacgccatgctggacgagatgcgggatcgcgaagccttcgtggaccagaagaacaagagccggaaggaccggcagaaggacgagcaggctgatctgaggcctaccacacctcctatcatcggccctgatagcagcgacgagccttccgtggatgtccagcctgatgagagccccgaggaactggatatccccgagttcgacatctgggacttcgacgacgacgatgcctga

SEQ ID NO: 194 - DNA, 813 bp, Artificial Sequence
  Synthetic
atgatcgccctgcaggaccaagaagtgcaggcccacattgagcggctgcggagagataagacagtggccctggatagcgtgaagcaggcccatacctggctgaagcggaagagaaacgccagacagtgcggcagactgaccggcgattctagaaccggcaagaccaagacctgcgagagcttcctgaagctgtacggcgagcctgatctgagcggcagagtgcctatcatccccatcagctacgtgcaccccaagcaagagtgcaccagcagagagctgttcagagagatcctggaacagtacggcgacgacctgcctagaggcacagtgggagatgccagatctcggaccctgaaggtgctgagagcctgcaagaccgagatgctgatgatcgacgaggccgacagactgaagcccaagacctttgccgacgtgcgggacatcttcgacaagctggaaatcagcgtgatcctgatcggcaccaagcagcggctggatcccgccgtgaagaaagacgaacaggtgttcaaccggttcagaagcagctaccggatcggcacaatccccagcaaccagctgaaaaccatcgtcggcctgtgggagagagacattctgaagctgcccgtgcctagcaacctgacctctgaggccatgctgaaagagctgagaaaggccaccggcgtgtcccggaagggctattatatcggcctgatcgacatggtgctgcgcgaggctgctatcagagccctggaaaagggccagagcaagatcgagctggaaaccctgaaagaggtggccaaagagtacagctga

SEQ ID NO: 195 - DNA, 498 bp, Artificial Sequence
  Synthetic
atggtcatccctcagatccctgcctgggtgttccccgtggaaccttctcctggcgaatccctgtctcacttcctgggcagattctgcagagagaaccacaccacactgaaccagctgggcgagaaaacaggactgggagccgtgctcggaagatgggagaagttccggttcatcccacagcctagcgacgctcaactggccgctctggccaaactcgtcagactggaagtggaccagatcaagcagatgctgccccaagagacaatgcagaacagagtgatcagactgtgcgccgcctgctacgccgaggaaccttatcacagaatcgagtggcagtacaagctggccaacagatgcgaccggcaccatctgttgctgctgctggaatgccccaactgcaaggccaagctgcccatgcctagcaagtgggccaatggcacatgcaagcggtgtctgacccctttcgagcagatggccgatctccagaagggcatctga

SEQ ID NO: 196 - DNA, 500 bp, Artificial Sequence
  Synthetic
tattgggaaaattggttcaccgagatttaggccaaatggaggttgaaaaccaccattacatagataagtggccaatttaattcgcgaacgtacatgtcgcataacacgtaatccgtcgccataacacgctcttgtcgccgaccattaaatggctagacccctttgaattcaggaaccttggcgatttcatcctcactctaaagagcgctcttgaataacaaaatatttgacgcctcttgaagaatgaacacaatcagtgtcgtctctttgaagctgaaatcgcctcagtattaacgcactctttgtcgcctctttgcggctttgtcggatctgatctaacaaattagatgacatatcttggcgactatagtacatttgatttaattcacttgtactaggtgactccatggaacttgttaatccagatgatctgaattcagtagaatccaggctcaagctagaaattatcgagaaactttcagagccctgcgatcgcaaaa

SEQ ID NO: 197 - DNA, 501 bp, Artificial Sequence
  Synthetic
ggtcgccaaaagcatttcagggcagggcagattgaaatcgctagggcctgcctgattacgaccaacttgtttcatcagagcgatacagatgaaatcttagaatatttgtacttgattcaatatcggcgttaacatatcaagcaggtggattgaaaggcgcacttcgttcgggaaagggcagcttagtcttgataagtgcttttttagatgcaaactcgatcgacgacaatattgtgtgatcagtcgcatctagcaactaaacgacacgaatgtgtgatggacgacagcgaaatagttacgatgacacgaatgtgttatcgatgacaaataatatgttactcgacaactttgaaagaatcgggatgagaggattcgaacctccggccccttcgtcccgaacgaagtgcgctaccaagctgcgctacatcccgtagttatcagatactaaattagcatagaggcgcgatcgctgttcattgcctttgaaaattgaaaaccgtt

SEQ ID NO: 198 - DNA, 1866 bp, Artificial Sequence
  Synthetic
atggccgacgaggaattcgagttcaccgaggaactgacccaggtgccagatgccatcctgctggacaagagcaacttcgtggtggaccccagccagatcatcctggaaaccagcgacagacagaagctgaccttcaacctgatccagtggctggccgagtctcccaacagaaccatcaagagccagcggaagcaggccattgccgatacactgggcgtgtccaccagacaggtggaaagactgctgaagcagtacgacgaggaccggctgacagagacagccggaattgagagagccgacaagggcaagtaccgggtgtccgagtactggcaggacttcatcaagaccatctaccagaagtccctgaaggacaagcaccctatcagccctgcctctgtcgtgcgggaagtgaagagacacgccatcgtggacctgaagctgaagcctggcgacttccctcaccaagccaccgtgtacagaatcctgacacctctgatcgagcagcacaagagaaagaccagagtgcggaatcctggcagcggcagctggatgacagtggtcacaagagatggccagctgctgaaggccgacttcagcaaccagatcattcagtgcgaccacaccaagctggacatccggatcgtggacatccacggcagcctgctgtctgattgtccttggctgaccaccattgtggacacctacagcagctgcgtcgtgggcttcagactgtggatcaagcagcctggcagcaccgaagttgccctggctctgagacatgccattctgcccaagaactaccccgacgactacaagctgaacaaagtgtgggagatcagcggccctccattccagtactttttcaccgacggcggcaaggacttcagaagcaagcacctgaaggccatcggcaagaaactgggcttccagtgcgagctgagagacagacctcctgaaggcggcatcgtggaacggatctttaagaccatcaacacccaggtcctgaaggatctgcctggctacacaggcgccaacgtgcaagaaagacccgagaacgccgagaaagaggcctgcctgacaatccaggatctggataggatcctggccagcttcttctgcgacatctacaaccacgagccgtatcctaaagagccccgggacaccagattcgagcggtggtttaaaggcatgggcggcaagctgcctgaggctctggatgagagagagctggatatctgcctgatgaaggaagctcagagagtcattcaggcccacggctccatccagttcgagaacctgatctacagaggcgagtctctgaaggcctaccggggcgagtatgtgaccctgagatacgaccccgaccacattctgaccctgtacgtgtacagctgcgaaaccgacgacaacgtggaaaacttcctggactacgcccacgccgtgaacatggacacacacgatctgagcgtggaagaactgaaggccctgaacaaggatcggagcaaggcccggaaagagcacttcaactacgacgccctgctggccctgggcaagagaaaagaactggtggaagagaggaaagaggacaagaaagagaagcggcggagcgagcagaagagactgagaggcgccagcaagaaaagcagcaacgtgatcgagctgcggaagtccagagccagcaccagcctgaagaaggacgaccaccaagaggtgctgcccgagaaagtgtgcaccgaagagatcaagatcgagaagattgagccccagcctcaagagaacatcagcgcccagatcgacacccaagaggaacacaggcacaagctggtggtgtccaaccggcagaagaacctgaagaaaatctggtga

SEQ ID NO: 199 - DNA, 855 bp, Artificial Sequence
  Synthetic
atggccagatctcagctggccacacagagcttcgtggaagtgctggctcctcagctggatctgaaggcccagatcgccaagaccatcgacatcgaggaactgttccggacctgcttcatcaccaccgacagagccagcgagtgcttcaagtggctggacgagctgcggatcatgaagcagtgcggcagagtgatcggccccagagatgtgggcaaaagcagagctgccctgcactaccgcgacgaggacaagaaaagggtgtcctacgtgaaggcttggagcgccagcagcttcaagagactgttcagccagatcctgaaggacatcaaccacgccgctcctaccggcaagagacaggatctgaggcctagactcggcggcagcctggaactgtttggactggaactggtcatcatcgacaacgccgagaacctgcagaaagaggccctgatcgacctgaagcagctgttcgaggaatgccacgtgccaatcgtgctcgtcggcggaaaagagctggacgatatcctgcagggctgcgacctgctgaccaactttcccacactgtacgagttcgagcggctggaacaagaggacttcagaaagaccctgagcaccatcgagttcgacatcctgagcctgcctgaggcctctaatctcggcgagggcaacatcttcgagatcctggccgtgtccaccaacgccagaatgggcgtgctggtcaagatcctgacaaaggccgtgctgcacagcctgaagaacggcttcagcagagtggacgagagcatcctggaaaagatcgccagcagatacggccggaaatacgtgcccctggaaagccggaaccggaacgaatga

SEQ ID NO: 200 - DNA, 567 bp, Artificial Sequence
  Synthetic
atgctggtggtcatggccgagaacacattccccagcaaggtggaaatcggcatgaacgaggacgacgagatcctgcctaagctgggctacgtggaaccttacgagggcgagagcatcagccactacctgggcagactgcggagattcaaggccaacagcctgcctagcggctacagcctgggaaagattgctggactgggcgccgtgatcagcagatgggagaagctgtacttcaacccgtttcctacacagcaagagctggaagccctggcctctgttgtgggagtgaacgccgatagactgagccagatgctgcctcctaagggcgtgaccatgaagcccagacctatcagactgtgcggcgcctgctaccaagagagcccctttcacagaatcgagtggcagttcaaggacgtgatggtctgcgaccggcaccagctgagactgctgaccaagtgcaccaactgcgagacaccctttcctatacctggcgactgggtgctgggagagtgccctcactgctttctgccttttgccaccatggccaagaagcagaagaagggctga

SEQ ID NO: 201 - DNA, 500 bp, Artificial Sequence
  Synthetic
tttaatgaaagtcacgaaaatacgtaacttatgtcccacgaattcggaaaattggacattaattctttaaaactgacaataattatttaaattatgtacattcgcaaattatatgtcgcgattcgcaaattagtgtcgcaactgctttaaagcctggaagctatattgtgtaagtatcataagctatttaccccagaaaagaccaataaacttaattcgcatattgtatgtcgcaaagtccaatttcgcatattatatgtcgtttgttaagaattaggtctttcgcaaattagatgtcggattttgtcataattaatggtacattagtacgttaattattcatgagtgggtttcactctaatggcagacgaagaatttgaattcactgaagaattgacacaagttccagacgctattttgcttgacaagagtaattttgtggtagacccatcgcaaattattctagaaacttcggataggcaaaaactgacatttaatct

SEQ ID NO: 202 - DNA, 500 bp, Artificial Sequence
  Synthetic
gctaggagtgtattaataatagaagattcaaatctttcaaatttttctgagagggttgaaaggagcgctacaatggcatcattgatttcagaactttagaataattgaacactacgagcttaaataataatgctttcttttcgacgacattattttgttaacgtttactatgtttgtttagacgacactaatttgttaataacgacattaatctgttattcgacatctagctattagggcgacaaataatttgtcgctctatgacttgagatcaagacagtctgcgacattaatttgcgaaaagttagtgtaattaaattacctacataaaaaccaccaaagcgacattaatgtgccaatcgcgacactaatttgcgaattgcgacatataatttgcgaatttacaacaatggaggtaagcgggttcgaaccgctgacctctgcaatgccattgcagcgctctaccaactgagctatacccccttgtcatgcgtttctga

SEQ ID NO: 203 - DNA, 1899 bp, Artificial Sequence
  Synthetic
atgagcaccagaagcctgtctcagggcgccaatctgcctggacacgaagaagtgctggccacagagcaaggcggcgaacaggtggaaggcaagagctacctgctgttcaacgacgacagccccgagttccagcagaaagtggacgtgatcgacgccatcgtgcaggcccctgacaagaacgccagaagagaggccattgccgaggccgctaaagccctgggcaagtccaccagaaccatcaagcggatgatcgagcgggtgcagaaagacggcgttgccacacttgctgtgggcagacaggataagggccagttcagaatcagcgagcagtggttcaagttcatcgtggacacccacaaatggggccagaccaagggcagcagaatcaaccacaaccagatccacgtgcagctgatctccctggccagcaagggcgaagatctgcggagcaagaaatacgtcgagaagttcaagcagtaccccgaggtgctggaagatctgatcgagggcaagttccccagccacgtgaccgtgtacaaagtgatcaacttctacatcgagcaagagaaccggatcgtgcggcaccctggatctccaagagagggccagatcatccagaccaccgagggcatcctggaaatcagccacagcaatcagatctggcaggtcgaccacaccaagctggacatcctgctgatcgacgatgaggacaaagagatcatcggcagaccctacatcaccctggtcatggacagctacagcggctgcgtcgtgggcttttacctgggctatgagtctgccggctctcacgaagtggccctggccttcagacacagcatcctgcctaagcactacgagcccgagtacgagctgcaagagaagtgggacatcttcggcgtgccagagtacctggtcaccgacagagccaaagagttcaagagcgcccacctgaagcagatcagcctgcagctgggcttccagcggagactgagagcctttccttctgccggcggactgatcgaaaccatcttcgacaagatcaacaaagaggtgctgagcttcttcggcggctacacaggcagctctgtggaagaaagacccaagaatgccgagaaaaccgcctgtctgaccctggaccagctggaaaagatcctcgtgcggtacttcgtggaccactacaaccagcacgactaccccaaagtgaagcagctgaagcggatcgagagatggaagtccatgctgctggtggaacccgaggtgttcgacgagagagagctggatatctgcctgatgaaggccacctaccggaacgttgagaagtacggcagcgtgaactttggcggcctggtgtaccagggcgatagcctcgttggatacgagggacagaagatctctctgagatacgaccagcggaacatcctgacactgctggcctacaccagacctagcaatgcccagcctggcgagtttatcggcgtggtcaaagcccgcgacctggaaaaagagagactgagcctgggcgagctgaactggatcaagaagaagctgcgcgagaaggccaaagaagtggacaacagctccatcctgaacgagcggctgaagatcgtggaagaggtcgaggaaggcagaaagagccggcggaagagacagaggaaggcccaagaaaagcacgcccacgagagcaacaagagcaaagtgctggaaatgttccccgagaacgccacactggaagaaaccgccatcacacaagagaacttccccagcgctcctaccaccagccagaacgtggtcaagagcatcaacaagcaggatatccccgaggccaaccggaccgccaaaacaagacgacctagagtgggagtgcaggactggaaccagttcgtgaaggacaactggtga

SEQ ID NO: 204 - DNA, 921 bp, Artificial Sequence
  Synthetic
atgagcgagacaaatctggcccacgtgcagcccaagctgcagaagcagtttgacgcctctctgcagtccgccgaggaactgagaaggctgccagagattcaggccgaggtggaaagaatcggcaaggccgatacctacctgcctctggacagagacaccgagctgttcgactggctggacgatcagagggatgccaagctgtgtggctacgtgacaagcgccacaggctctggactgctgaaagcctgccagctgtaccggatgcagtacgtgaagagaagaggcaccctgctggaaatccccgccacagtgatctacgccgagatcgatcaacacggcggacccaccgatctgtactacagcatcctggaagaagtgggacaccctctgaccaatgtgggcgccctgagagatctgagagccagagcttggggaaccctgaaggcctacggcgtgaagatcctgatcgtgggcaacgccgactacctgacactggaaggcttcaacgagctggtggacatcttcaccaagcggcggatccccatcatcctcgtgggcacctactacctgagcgagaatatcctggaacggaagtccctgccttacgtgcgggtgcacgacagctttctggaaccctacgagttccccaacctgaccgaagaggacatcatcgaggtggtggacgactgggagcagaagttcctgacacaggacggccggctgaatctgacccagatggaaagcgtgatcagctacctgaagctgaagtctggcggcctgatcgagcccctgtacgacctgctgagaaagatcgccattctgaagctggacgagcccagcttcgagctgagccaggacaatctgaccagaaagttcggcagacggaaagagcccaaagtcaagttccagcggaagggctga

SEQ ID NO: 205 - DNA, 513 bp, Artificial Sequence
  Synthetic
atggaacctgaggccgtgcaacaccctccttggtacgtggaacctaacgagggcgagagcatcagccactacttcggcagattcagacggcacgaggccgtgtgtgttagctctcctggcacactgtctaaggccgctggaatcggacctgtgctggccagatgggagaagttccggttcaacccatttccgatccagaaagagctggaagccattgccaagctgatcggcctggacgtggacagaattgcccagatgctgcctcctaagggcgagaagatgaagatggaacccatcagactgtgcgccgcctgttatgccgagcagccttaccacagactggaatggcagttccagagcaccgtgggctgcgagagacacaagctgagactgctgagcgagtgccccttctgcaaagagagattcgctatccccgctctgtgggagaagggcgagtgcaagaaatgtcacgccctgttccggtccatggccaagagacagaaggcctactga

SEQ ID NO: 206 - DNA, 500 bp, Artificial Sequence
  Synthetic
taccttctggacattgcccacatctgtctcgtcctgaccttcttgcctcaatattaactagtaattaattttttgatccatattttaggaaattaaccgaagcgtattgagtgtgaacaagggaatatctttgaaattttaattcggcatagacgaacgatattatctaattaataacgacatgaatttgcaaattgcgacattgaatttgcgaatgtacacatggtgtccattaaataattattgtcacttttaaagaattattgtccagttttacgatatctgtataacaggctcaaaggcttaccaaacaagtctttgagctatatttatacttttattattctctagccagttttaaagtaaatgatgtcatttttctgataaatttttaaagtaaatgatgtcatttttcttggaagacgggtcaagtgtatgtctacgcgttctttgagtcaaggcgctaatctccccggtcatgaggaagttcttgcaacgga

SEQ ID NO: 207 - DNA, 1000 bp, Artificial Sequence
  Synthetic
gcatatagggtgataaatccaaaccaataacttccgcttgccagaaagcctgttttaacattaaagttgtggaacctgtgccgcaacctaaatcaagtatgcgtcgtggtttcaccttgacggcatcaactaaagcttgacggacaatactttcattcggtggcagaacatattgggtaatcggatcgtaagtaactgctgcactggaattgagatatccgcctgtaacaccatgaaaattttgactactgtagtacgccggaattatcacatcatctcgttggaagcgatcgctctctttctcccagtcaatactatcagcgtaacgccgtaacccgtcttcatcaatcaaaagacgcactacaggggataaaaaacgttcccagattgtatcttgacgcactaccatattgtgtcagaactttaaaagtttacttaagtaaagtaattttctttacaaattttaatacatttatgagacatctgctttctgtctgtggtattggcttgacgcttgtaattattttagttacacttgtaatacaaagaagctactctctaaaagtagttcttcagcttcacgaaaattgagcgaacaaaatgaaagacaatataacatttaaattgctacaactaactagtagtatgtcaatttgaaatcaatgccttacaacaaacctacagaacttatttcaaaaaccaaatactagtcatatcgataataagttataagtcatatcgatacttatcagtgacatcctcacctacctaaaggcgcggtgattctggagtaatgagtaataagtaatgagtaaatacccatttttcatccactcattactcattactccttactcattactcattactttaaagcattgtgtgaagcacagggcttcagatccaaatatgtggtgacatcgacccaatcgaaaatctaaaattcaaaatccaaaatagaaacaattatgccatacgaaaagttagaaattaccacacc

SEQ ID NO: 208 - DNA, 1746 bp, Artificial Sequence
  Synthetic
atgcaggatacccacagcagcaagacccctgccaacagcaatagcaccctgaccgagacaaacgtgatcgtgtccgagctgagcgacgaggccaagctgaagatggaagtgatccagagcctgctggaagccggcgacagaacaacatacgcccagagactgaaagaggccgccgagaagctgggaaagtctgtgcggacagtgcggcggctgatcgacaagtgggagaaagagggactgatcggcctgacacagaccgagagaaatgacaagggcaagcacagagtggacgagaactggcaagagttcatcctcaagacctacaaagagggcaacaagggcagcaagcggatgaccagacagcaggtcgccgtcagagtgaaggccagagctgatgagctgggcgtgaagcctcctagccacatgaccgtgtacagagtgctgaagcccctgattgacaaagaggaaaaggccaagagcatcagaagccccggctggcgaggaagcagactgagcgtcaagaccagagatggcaaggatctgcaggtcgagtacagcaatcaagtgtggcagtgcgaccacaccagagtggatgtgctgctggtggatcagcacggcgagattcttggcagaccttggctgaccaccgtgatcgacagctacagcagatgcatcatcggcatcaacctgggctacgacgcccctagctctcagattgtggctctggccctgagacacgccatcctgcctaagagctacggcagcgagtatggcctgcacgaggaatggggcacatacggactgcccgagcacttctataccgacggcggcaaggacttcagaagcaaccatctgcagcagatcggcgtgcacctgggcttcgtgtgtcacctgagagtgtctaaggcccctccattcgctcagagactgcggagaaggcaagaggccagaccttctgaaggcggcatcgtggaaagacccttcaagaccttcaacaccgagctgttcagcaccctgcctggctacacaggcagcaacgtgcaagagaggcctcaagaggccgagaaagaagcctgtctgaccctgaggcagctggaacagcagctcgtgcggtacatcgtgaaccactacaaccagcggctggacgccagaatgggcgatcagaccagatttcagagatgggagagcggcctgatcgccacactggatctgctcagcgagagagatctggacatctgctttatgaagcaaacccgcagacagatccagagaggcggctacctgcagttcgagaacctgatgtaccggggcgagtacctggctggatatgccggcgaatctgtggtgctgagatacgaccccagagacatcaccaccatcctggtgtaccggaaagaaggcgacaaagaagtctttctggccagggcctacgctcaggacctggaaacagagcagctgagcatcgatgaggccaaggccagctctagacaagtgcggaaggccggcaagaccgtgtccaacagatctatcctggccgagatcagagagcgggaaacctttagcacccagaaaaagaccaagaaagagcggcagaagatcgagcaggccgaggtgcagaaagccaagcagcccatcagagtggaacccgaggaacaggtggaagtggccagcattgatgcccagaccgagcctgagatgcccgaggtgttcgactacgagcagatgagagaagattacggctggtga

SEQ ID NO: 209 - DNA, 837 bp, Artificial Sequence
  Synthetic
atgaccacacaagaggcccaggctgttgctcagcagctgggagagatccccgtgaacgatgagaagctgcagaaagagatccagcggctgaaccggaagggcttcgttcctctggaacaggtgcagatcctgcacgactggctggaaggcaagagacagagcagacagtccggcagagttgtgggcgagagcagaaccggcaagaccatgggctgtgacgcctaccggctgagaaacaagcctaagcaagaggccggcaagcctcctacagtgcccgtggcctatatccagattcctcaagagtgcggcgccaaagaactgttcagcgtgatcctggaacacctgaagtaccaagtgatcaagggcaccgtggccgagatcagagacagaaccctgagagtgctgaaaggctgcggcgtggaaatgctgatcatcgacgaggccgaccggttcaagcccaagacctttgctgaagtgcgggacatcttcgacaagctggaaatctccgtgatcctcgtgggcaccgacagactggatgccgtgatcaagagggacgaacaggtgtacaaccggttccggggctgccacagatttggcaaactgagcggcgaggacttcaagcggaccgtggaaatctgggagaagaaggtgctgcagctgagcgtggccagcaacctgagcagcaagacaatgctgaaaaccctgggcgaagccaccagcggctatatcggactgctggacatgatcctgagagagagcgccatcagagccctgaagaaaggcctgcagaaggtggacctggaaaccctgaaagaagtggccgccgagtacaagtga

SEQ ID NO: 210 - DNA, 528 bp, Artificial Sequence
  Synthetic
atggaagtgaccgagatccagagctggctgttcagagtggaacccctggaaggcgagagcctgtctcacttcctgggcagattcagacgggccaacgatctgacaccaaccggcctgggaaaagccgctggacttggcggagctattgcttatggcggagccctgcctatcgccagatgggagaagttccggttcaaccctccacctagccggcagcaactggaagccctggctacagtcgtgggagtcgatgccgatagactggaacagatgctgcctcctaccgaagtgggcatgaagatcgagcccatcagactgtgcggcgcctgttatgcccagtctccttgccacaagatcgagtggcagttcaaagtgacccaagagtgcgccagccacaagctgagactgctgagcgagtgccctaattgcggcgccagattcaaagtgcccgctctgtgggttgacggctggtgccagagaagcttcctgaccttcgtggaaatgacccgctaccagaaaagcgtgtga

SEQ ID NO: 211 - DNA, 500 bp, Artificial Sequence
  Synthetic
gaattagagtaaatcgtcaagactacttaagcaagttcacaacctaattaaccaaaaactatacgtaggatatccatctgatacctaaaaactacaattttgaagtatcatatgccctcaaaagtttaatttttagtgtacattcactaattatttgtcaatttaacaaaatattgtcaaaatacgtgtaaatgactgaaaccctgctgtaacaaagcttatggcaggtttttaattattaaacttctcacaaccaccgttaaacgcgattcacaaattagatgtctaatccctgaaatttaacaatttaagtgtcactttccagaaacaaggaaaattactaagttttagaaaacttaacagattaaatgtcactctggataggtagaatagacatatatgttgcaattaaacaaatgtgtatatgcaggacactcattcttctaaaacacctgcaaactcaaatagcactctcaccgaaacaaatgtcattgtgtcgg

SEQ ID NO: 212 - DNA, 500 bp, Artificial Sequence
  Synthetic
gttacaacaaccctcccggataggggcgggttaaaagagcattactatgttccgcaagctaggctcaaaattccaatatattctttaaatataggtgggttgaaagaggtcacgagttcaatcttcttcgttgaaagtagaattataaaatgaactcagcaatgttgacatttaattcgttaaaactagaaaactagtaattatttgtcgataactgtgcaagccaggtgaagtgacaattattctgttaacagtgacattaactgtttaaaagtgacatcaatctgttaacagtgacaaataattagttagggcttgctgaaaaagaaagaaaaggcagcattctatgatttttagagcagagatatgtattcaagtgcaagaaaaaaggctataatactctgaaacccttgcatcaccgtaagctcctggtatacttagtagcttaagtaacgatgtaccgaaaaaaggaaccaactcaaattccaccggaaagcttt

SEQ ID NO: 213 - DNA, 1884 bp, Artificial Sequence
  Synthetic
atgagcggctttcacagcatggccgacgaggaattcgagttcaccgaggacagcacccaggtgccagaagccatcctgctggacaagagcaacttcgtggtggaccccagccagatcatcctggccacaagcgacagacacaagctgaccttcaacctgatccagtggctggccgagtctcccaacagaaccatcaagagccagcggaagcaggccgtggccaacacactggatgtgtccaccagacaggtggaacggctgctgaagcagtacgacgaggacaagctgagagagacagccggcatcgagagagccgacaagggcaagtacagagtgaacgagtactggcagaacttcatcaagaccatctacgagaagtccctgaaggacaagcaccctatcagccccgccagcatcatcagagaagtgaagagacacgccatcgtggacctgggcctgaagctgggagattatccacaccaggccaccgtgtaccggatcctggatcctctgatcgagcagcacaagagaaagaccagagtgcggaatcctggcagcggcagctggatgacagtggtcacaagaaagggcgagctgctcaaggccgacttcagcaaccagatcattcagtgcgaccacaccaagctggacgtgcggatcgtggacaaccacggcaatctgctgagcgagaggccttggctgaccaccattgtggacaccttctccagctgcgtcgtgggcttcagactgtggatcaagcagcctggctctaccgaagtggccctggccttcagacatgccattctgcccaagaactaccccgaggactaccagctgaacaagagctgggatgtgtgcggacacccctaccagtactttttcaccgacggcggcaaggacttcaacagcaagcacatcaaggccatcggcaagaaactgggcttccagtgcgagctgagggacagacctcctgaaggcggcatcgtggaacggatctttaagaccatcaacacccaggtcctgaaggatctgcctggctacacaggcgccaacgtgcaagaaagacccgagaacgccgagaaagaggcctgcctgacaattcaggatctggataagatcctggcctccttcttctgcgacatctacaaccacgagccgtatcctaaagagccccgggacaccagattcgagcggtggtttaaaggcatgggcggcaagctgcctgagcctctggatgagagagagctggacatcttcctgatgaaggaagctcagagagtcgtccaggctcacggctccatccagttcgagaacctgatctaccggggcgagttcctgaagtcccacaagggcgagtatgtgaccctgagatacgaccccgaccacatcctgagcctgtacatctacagcggcgagacagacgacaataccgaagagttcctgggctacgcccacgccatcaacatggacacacacgacctgagcatcgaggaactgaaggccctgaacaaagagcggagcaacgcccggaaagagcactgcaattacgacgccctgctggccctgggcaagagaaaagaactggtggaagaacgcaaagaggacaagaaggccaagcggaacagcgagcagaagagactgagaagcgccagcaaaaaggacagcaacgtgatcgagctgcggaagatcagagccagcaagagcagcaagaaacaagagaatcaagaggtgctgcccgagcggatcagccgggaagagatcaagatcgagaagattgagcagcagccccaagaaaacctgagcacaagccccaatcctcaagaggaagaacggcacaagctggtgttcagcaacagacggaagaacctcaacaagatctggtga

SEQ ID NO: 214 - DNA, 852 bp, Artificial Sequence
  Synthetic
atggctcagcctcagctggccacacagagcatcgtggaagtgctggcccctcggctggatatcaaagcccagatcgccaagaccatcgacatcgaggaaatcttccgggcctgcttcatcaccaccgacagagccagcgagtgcttcagatggctggacgagctgcggatcctgaagcagtgcggcagaatcatcggccccagaaacgtgggcaagagcagagctgccctgcactacagagatgaggacaagaaacgggtgtcctacgtgaaggcttggagcgccagcagcagcaagagactgttcagccagattctgaagaacatcaaccacgccgctcctaccggcaagacccaggatcttagacctagactggccggcagcctggaactgttcggactggaactggtcatcatcgacaacgccgagaacctgcagaaagaggccctgctggacctcaagcagctgttcgaggaatgcaacgtgcccatcgttctggctggcggcaaagagctggacgaacttctgcaggactgcgacctgctgaccaactttcccacactgtacgagttcgagcagctggaatacgacgacttcaagaaaaccctgaccaccatcgagctggacatcctgtctctgcccgaggcctctaatctggccgagggcaacatcttcgagatcctggccttcagcaccaacgccagaatgggcatcctgatcaagatcctgaccaaggccgtgctgcacagcctgaagaacggcttccacagagtggacgagtccatcctggaaaagatcgccagcagatacgggaccaagtacatccctctggaaaaccggaaccgggactga

SEQ ID NO: 215 - DNA, 567 bp, Artificial Sequence
  Synthetic
atgctggtggttatggcccagaacatcttcctgagcaagaccgagatcggcatcgacgaggacgacgagatcagacccaagctgggctacgtggaaccttacgagggcgagagcatcagccactacctgggcagactgcggagattcaaggccaacagcctgcctagcggctacagcctgggaaagattgctggactgggcgccatgatcagcagatgggagaagctgtacttcaacccgtttcctacacctcaagagctggaagccctgtctagcgccgtgggagtgaatgtggaccggctgatggaaatgctgcccagccagggcatgaccatgaagcccagacctatcagactgtgcgccgcctgttatgccgagtctccttgccacagagtggaatggcagctgaaggaccggatgaagtgcgaccggcacaacctgcggtttctgatcaagtgcaccaactgcgagacaccctttcctatacctgccgactgggtcaagggcgagtgccctcactgctttctgagcttcaccaagatggccaagcggcagaagcgggactaa

SEQ ID NO: 216 - DNA, 500 bp, Artificial Sequence
  Synthetic
cagcttttgctttacccctactacacatctgggttctttgtcatttggcaaaagtttaaatctcacccgtgtttagtatacatgtacattcgcaaattatatgtcgcatttcgcaagtcatgtcgcaactgcttttaagggctagaacctttattatataagcatcataagttatttacccctacaaaagacaaaattacctaattcgcatattgtatgtcgcaaaacctaatttcgcaaattaaacgtcggttgttaagattttggtattttgcaaattagatgtcgcatttttgagagattcatggtacattagtaccttaatcattcatgagtgggtttcactctatggcagacgaagaatttgaattcactgaagactcgacgcaagttccagaagctattttgcttgacaagagtaattttgtcgtagatccatcccaaattattctggcaacgtcggataggcataaactgacatttaatttaatccagtggct

SEQ ID NO: 217 - DNA, 500 bp, Artificial Sequence
  Synthetic
gtttcaactagcatcccgactaggggtggttaaaaatataggttattgacttgcgttaaccattaaaatggttgcaaaatagaaatgatcatgggagggttgaaaggagtgctgcgatcgaacacatattaataatcaaattaatgcccttgcagcaataatttattgtattgtgtagtcaatgttaagttcatgcgacattaatttgcgaaaacttagaataattaaattgactcagaaaaacaaccaccgcgacattaatttgcgaagaacgacattaatttgcgaactgcgacatataatgtgcgaatgtacacaaatggagaataggagactcgaacccctgacctctgcggtgcgatcgcagcactctaccaactgagctaattccccttagtcgtgcttaagtcaaaaactttagcacactatatatcttaacactcaggaaggacagatttcacatctttttccaaaaaaacttcctgtacctgctgcaaatc

SEQ ID NO: 218 - DNA, 1731 bp, Artificial Sequence
  Synthetic
atgacccacgcctctatcgccgacgtggaaaatggaaaggccgaggccaacatcatcgtgtccgagctgtctgatgaggccctgctgaagatggaagtgatccagacactgctgaaaaacagcgactgcagcaccagaggcgagctgctgaaacagtctgccgagaagctgggcaagagcgtgcggacagttagacggctggtggacaagtgggagaaagaaggactggccggcctggtgcagaaccagagagatgataagggcaagcaccgcgtgaacaagtactggcaagagttcgtgctgaccacctacaaagagaacaacaagggcagcaagcggatgacccggcagcaggttttcatcagagccaaggccagagccgacgagctgggaattgaacctcctagccacatgaccgtgtaccggatcctgaagcctctgatcgacaagcaagagcaggccaagagcatcagaagccctggctggcgaggcagcagactgagcgtgaaaaccagagatggcaaggatctgcaggtcgagcacagcaatcaagtgtggcagtgcgaccacaccagagtggatgtgctgctggtggatcagcatggcaagatcctgagcagaccctggctgaccacagtgatcgacagctacagccggtgcatcatgggcatcaacctgggctacgatgcccctagctctaccgtggttgctctggccctgagacacgccattctgcccaagcagtacagcagcgagtacggcctgcacgaggaatggggcacatatggcctgcctcagaacttctacaccgacggcggcaaggacttcagaagcaaccatctgcagcagatcggcgtgcagctgggcttcgtgtgtcacctgagagacagacctagcgaaggcggcagcgtggaaagacccttcaagaccctgaacaccgagctgttcagcaccctggccggctacacaggcagcaatgtgcaagagaggcctgaggaagccgagaaagaggcctgtctgacactgagacagctggaaaagatgctcgtgcggtacatcgtggacaactacaaccagcggatcgacgccagaatgggcgaccagaccaggtttcagagatgggagtctggcctgatcgccatgcctgatctgctgagcgagagagatctggacatctgcctgatgaagcagaccagacggcagattcagagaggcggctacctgcagttcgagaacctgatctatcggggagagctgctggccggatatgccggcgaatctgtggtgctgagatacgaccccaaggacatcacaaagatcctggtgtacagaatgagcgagggcaaagagatcttcctggccagagcttacgcccaggacctggaagccgaagaactgtctctggatgaggccaaggcctccagcagaaaagtgcgcgaaacaggcaaggccatcaacaaccggtctatcctggccgagatccgggaaagagagacattccctacacagaagaaaacccggaaagagcggcagaagctggaacagaccgaagtgaagaaggccaagcagctgacccctgtggaaaccgagaaggccatcgacgtggtgtccatcgatgccaagcctaccggcaagaacccagtggaaagcgagctgtgtaccgagtccggcgagctggatatgcctgaggtgctggactacgagcagatgcgcgaggactatggctggtga

SEQ ID NO: 219 - DNA, 837 bp, Artificial Sequence
  Synthetic
atggtggccaaagaggcccaagaggttgccaagcagctgggcgacatccccgtgaatgatgaacagctgcaggcccagatccaccggctgaacagaaagggcttcgtgcccctggaacaggtgcagacactgcacgattggctggaaggcaagcggcagtctagacagtctggcagagttgtgggcgagagcagaaccggcaagaccatgggctgtgacgcctaccggctgagaaacaagcctaagcaagaggccggcaagcctcctacagtgcccgtggcctatatccagattcctcaagagtgcggcgccaaagaactgttcggcgtgatcatggaacacctgaagtaccaagtgaccaagggcaccgtggccgagatcagagacagaaccctgagagtgctgaaaggctgcggcgtggaaatgctgatcatcgacgaggccgaccggttcaagcccaagacctttgctgaagtgcgggacatcttcgacaagctggaaatccctgtgatcctcgtgggcaccgacagactggatggcgtcatcaagagggacgaacaggtgtacaaccggttcagaagctgccacagattcggcaagctgagcggcgaggaattcaagcggaccgtggaaatctgggagaagaaggtgctgcagctgcctgtggccagcaacctgagcagcaagacaatgctgaagtccctgggcgaagccaccggcggatatatcggactgctggacatgatcctgagagagagcgccatcagagccctgaagaagggactgcagaagatcgacctggacaccctgaaagaagtgaccgccgagtaccggtga

SEQ ID NO: 220 - DNA, 513 bp, Artificial Sequence
  Synthetic
atggtcgaggaagagtacatcaaaccctggctgttccaagtggaacccttcgagggcgagagcctgtctcacttcctgggcagattcagacgggccaacgaactgacacctggcggactgggaaaagccacaggactcggcggagccattgccagatgggagaagttccggttcaaccctccacctgatggccagcagctggaaaagctggccgtggtcacagccatcaacgtggacagactgacccagatgctggcccctcctggaacaggcatgaagctggaacccatcagactgtgcggcgcctgttatgccgagtctccctgtcacaagatcgagtggcagttcaaagagacacagggctgcaagcaccacaagctgagactgctgagcgagtgccctaattgcggcgccagattcaaggtgcccgctctgtggatggatggctggtgccacagatgcttcacccctttcgtggaaatggtcaagtggcagaagcagaccaaccactga

SEQ ID NO: 221 - DNA, 500 bp, Artificial Sequence
  Synthetic
cagaatggcaaagaagtagtttaaaactggcaccgctcaaaaagtgctgtttgtaaaggttggtgccgataatctctaaagcagcagttcgtgttgtacattaactaattatttgtcaatttaacaaattattgtcacaaatgtaggaaatcctgaaaaccctgccatctaaaggtttgtggcaggttttttattattttaagattccaagcctgtcaaagcttaattaacatattaactgtcaaatcccagaaatataacacattaattgtcagttcccaaaaatcaaacaaattaatgattttataaaatttaacaaattctttgtccatttattaatataatacaactatgtttttataaaacacatctatgaaggatgcaaaatctactacaaactctgcaatgacacatgccagcattgcggatgtagaaaacggtaaagcagaagcaaatattattgtttctgaactgtcagatgaagctttgttaaaaatgga

SEQ ID NO: 222 - DNA, 500 bp, Artificial Sequence
  Synthetic
gtttcaacgtccatctcagcttgagacgggttgaaagattagataccccaagtaaggatctcctcccttctttgtttctattttattaaataaggtttaattatttaaaatgaatatttgatacttgtagtaatggttaatgttatcggtattaaccacagtgctattctactgtggaaactggtcagttatttttgccagcctgcactagctccgggacactaatctgttaatattgacatcaatctgttaaatgtgacattaatttgttaagagtgacaaataattagttaatgtacacgtgtatcagaatatggtattagtaaatttaccagaacttaaaagtggagttgtttgaatgactgaaccacataaagctaacggtaatgcggttgaagcttggccaagtctaccattcgataaatggaaggacacgtatgcaacactccatatgtggactcaaattattggaaaaattcgacttgtgcaaagtccattct

SEQ ID NO: 223 - DNA, 1740 bp, Artificial Sequence
  Synthetic
atgggcgagacactgaacagcaacgaggtggacgagagcctggtgctgtacgatggctctgacgaagtggatgagatcagcgagagcgaggacaccaagcagaacaacgtgatcgtgaccgagctgagcgaagaggccaagctgagaatggaagtgctgcagagcctgatcgagccctgcgacagaaagacctacggcatcaagctgaagcaggccgccgagaagctgggaaagaccgtcagaacagtgcagcggctggtcaagaagtaccaagagcagggactgagcggcgtgacagaggtggaaagatctgacaaaggcggctaccggatcgacgacgactggcaggacttcatcgtgaaaacctacaaagagggcaacaaaggcggacggaagatgacccctgctcaggtggccatcagagtgcaagttcgcgctggacagctgggcctcgagaagtacccttgtcacatgaccgtgtaccgggtgctgaaccccatcatcgagcggaaagaacagaaacagaaagtgcggaacatcggctggcggggcagcagagtttctcaccagacaagagatggccagacactggacgtgcaccacagcaatcacgtgtggcagtgcgaccacaccaagctggatgtgatgctggtggaccagtacggcgaaaccctggctagaccttggctgaccaagatcaccgacagctacagccggtgcatcatgggcatccacctgggctttgatgcccctagctctctggtggtggccctggctatgagacacgccatgctgagaaagcagtacagcagcgagtacaagctgcactgcgagtggggcacatatggcgtgcccgagaacctgtttaccgacggcggcaaggacttcagaagcgagcacctgaagcagatcggcttccagctgggattcgagtgtcacctgagagacagacctccagaaggcggcatcgaggaaagaggcttcggaacaatcaataccgacttcctgagcggcttctacggctacctgggcagcaacgtgcaagagagagctgagggcgccgaggaagaggcctgtatcacactgagagaactgcatctgctgatcgtgcggtacatcgtggacaactacaaccagagaatcgacgccagaagcggcaaccagaccagattccagagatgggaagccggccttcctgctctgcccaacctggtcaacgaaagagagctggacatctgcctgatgaagaaaacccggcggagcatctacaaaggcggatacgtgtccttcgagaacatcatgtaccggggcgactacctgtctgcctatgccggcgaatctgtgctgctgagatacgaccccagagacatcagcaccgtgttcgtgtacagacaggacagcggcaaagaggtcctgctgtctcaggcccacgccatcgatctggaaaccgagcagatcagcctggaagagacaaaggccgccagcagaaagatccggaatgccggcaagcagctgagcaacaagtctatcctggccgaggtgcaggaccgggacacctttatcaagcagaagaagaagtcccacaaagagcggaagaaagaggaacaggcccaagtcaacttcgtgaagcctcctcagaccaacgagcccgtggaaaccgtggaagagatccctcagcctcagaaaagacggcccagagtgttcgactacgagcagctgcggaaggactacgacgattga

SEQ ID NO: 224 - DNA, 837 bp, Artificial Sequence
  Synthetic
atggccgaggactacctgagaaaatgggtgcagaacctgtggggcgacgaccccattcctgaagaactgctgcccatcatcgagcggctgatcacacctagcgtggtggaactggaacacatccagaagatccacgactggctggacagcctgagactgagcaagcagtgcggcagaattgtggcccctcctagagccggcaagagcgtgacatgtgacgtgtacaagctgctgaacaagccccagaagagaaccggcaagcgggacattgtgcccgtgctgtatatgcaggtccccggcgaatgttctgccggcgaactgctgacactgatcctggaaagcctgaagtacgacgccatcagcggcaagctgaccgacctgagaagaagagtgctgcggctgctgaaagaaagcaaggtggaaatgctcgtgatcgacgaggccaacttcctgaagctgaacaccttcagcgagatcgcccggatctacgacctgctgaagatcagcatcgtgctcgtgggcaccgacggcctggacaacctgatcaagaaagagccctacatccacgaccggttcatcgagtgctacagactgcctctggtgtccgagaagaaattccccgagttcgtgcagatctgggaagatgaggtgctgtgcctgcctgtgcctagcaatctgaccaagcgcgagacactgatgcccctgtaccagaaaacctccggcaagatcggcctggtggacagagttctgagaagggccgccatcctgagcctgagaaagggcctgaagaatatcgacaaggccacactggacgaggtgctcgagtggttcgaatga

SEQ ID NO: 225 - DNA, 531 bp, Artificial Sequence
  Synthetic
atggaaatccctgccgagcagcccagattcttccaggtggaacctctggaaggcgagagcctgtctcacttcctgggcagattcagaagagagaactacctgaccgccacacagctgggcaagctgacaggcattggagccgtgatcagcagatgggagaagttctacctgaatccgtttccgacacctcaagagctggaagccctggccgctgtggtggaagtgaaagtggaccggctgatcgagatgctgcctcctagaggcgtgaccatgaagcccagacctatcagactgtgcagcgcctgctaccaagagtccccttgccacagagtggaatggcagttcaaggacgtgatggtctgcgactgcctgagacactgccctctgaacaacagacaccagctggccctgctgaccaagtgcaccaattgcgagacaccctttcctatacctgccgactgggtgcagggcgagtgccctcactgttttctgcccttcaccaagatggccagacggcagaagcggtactga

SEQ ID NO: 226 - DNA, 600 bp, Artificial Sequence
  Synthetic
agttttgtgttgcacaaaccatcctaagcgacattagtttgcaaaaaacgacattaatttacgaatcgcgacctttaatttgcgaatatacaacagattttgtcgattaactaattatttgtcgtcttaacaaattaatgtcgcccaaatcttcaagactataatccttatgtatcaaaggttatagccttttgaacttatattggctatcatcaaatatttaactaattaagtgtcgtcttttaattaattaacattttaaatgtcgttttttcaaaaaacacctttccaaatttttcttttgctcataacaaaataactgtcgtcttttggaagtgagtgaaaaatataaaattaaatgtcgctttttggaacaaagtagtatgatatttattaggcaatagtagctatgtaacaacaaaaacatagttagattgaagtcttcttttttgtctctagctacgaagtcattacccttgctgcgattaaatttagacgcaagctaatttcgctcttagacttgctgtaccgtattgcctaaccaactagtttcaagcgatgaagtttgtttatgggtgaaacgctaaactccaacgaggt

SEQ ID NO: 227 - DNA, 500 bp, Artificial Sequence
  Synthetic
gtttcaacaaccatcccggctaggggtgggttgaaagtttaagttctattaactccaagttttaataattgcatggcaataacaatcctttttagaaaggatttaagagggttgaaaggaatgtcaccttcccaagaatacttttcaaaagctattttgggttagggaagaataatcacagataactaatatgcacaagtaagtctaaaatagggataagtctgtcgattagtccaatagcaaggcatcttgttagacgacattaatttgttaacgttagttggaactaattcgacgacattaattcgttaacagcgacattaatttgttaatgacgacattaatctgttaacgacgacattaatctgttaacgacgacaaataatctgttaattgacagatttgaaagcgggtgatgggactcgaacccacgacgttcaccttgggaaggtgacattctaccactgaattacacccgcaaatggagtttaggctcaata

SEQ ID NO: 228 - DNA, 2019 bp, Artificial Sequence
  Synthetic
atgacactggtgctgcacaccatcagcatcttcgtgctgctgaccgagagcagattcgcctctcctcctctgctggccaacttcctgtctagcagcaagctgttccagaaagagagcggcatcttcatcctgttcaccctgaagtggcagcagcccagcatggatgaatcccaggtggcctgcctggatgccgatcctcaggatttcgatgaggtggtgctgagcagccacgccttcgataccgatcctagcaagatcctgatcgacagcagcgaccggcacaagctgcggttcagactgattgagtggctggccgaggctcccaacagaaaagtgaaggccgagagaaagggcgccatcagcaagaccctggacatcagcaccagacaggtggaacggatgctgaaccagtacaacgccgacaagctgagagagacagccggcatcgagagagccgacaagggcaaccacagaatcgacgagtactggcaggactacatccgcgaggtgtacgagaagtccctgaaggacaagcaccctctgaagcccgccgatgttgtgcgggaagtgcatagacacgccgtgatcgacctgagacacgaggaaggcgattggcctcacgccgccaccgtgtacagaatcctgaagcctctggtcaagcggcacaagaggaaccagaagatcagaaaccctggcagcggcagctggctggctgtggaaacagaggatggcaagctgctgaaggccaatttcagcaaccagatcgtgcagtgcgaccacaccaagctggacatccggatcatcgacaaggacggaaagctgctgtcttggaggccttggctgaccaccgtggtggacacctttagcagctgcctgatcggctaccagctgtggcacaaacagcctggcgctcacgaagtggccctgacactgagacatgccatcctgcctaagcagtaccccgccgactacgagctggaaaagccctggaatatctacggcgctcccctgcagtacttcttcaccgacaaaggcaaggacctgagcaagagcaagctgatcaaggccctgggcaagaaactgggcttccagtgcgagctgagggacagacctatccaaggcggcatcgtggaacggctgttcaagaccatcaacaccgaggtgctggctcctctgccaggctacatcagcaaagaagaggacggcgccgagcgggccgaaaaagaggcctgttttaccatcgaggacatcgataagatcctggccagctacttctgcgacgactacaaccaccagccttatcctaaggaccctcacgacaccagattcgagcggtggtttagaggcatgggcaacaagctgcccgagcctatggatgagcgcgagctggatgtgtgcctgatgaaggaagaacagagagtcgttcaggcccacggcagcgtgtacttcgagaacctgacctacagatgcgaggaactgcggagcctgaagggcgagtacgtgaccgtgacctacgatcccgaccacattctgaccctgtacatctaccggcagagcacctctgatgaggccggcgagtttatcggatacgcccacgccatcaacatggacacccaggatctgagcctggacgagctgaagcagctgaacaaagccagaagcagcgccaagagagagcacagcaatttcgacgccctggtgtccctggacaagagacagaaactggtggaagagaggaagcaagagaagaaagagcggcagcggagcgagcagaagaagctgaggggaaagtccaagcaggacagcaaggtggtggaactgagaaaggacagagccggcaagagcacaaaccccaccgagtccatggaactgctgcctgagagagtgtcccctgagcagatgaagccactgagccctccaacacctcctattccagaacctgccgccagcgctccttctacacaagaaagacacaagctcgtgatccccaagaatcagaccctgaagcggatctggtga

SEQ ID NO: 229 - DNA, 867 bp, Artificial Sequence
  Synthetic
atggctcagcctcagctggctgtgcatgtgcctgtggaagttctggccccacagctggatctgacagacgtgctggccaagacagccgccatcgaggaactgttcaagaccgccttcattcccaccgacagagccagccagtacttcagatggctggacgagctgcggctgctgaagcagtgtggaagagtgatcggccccagagatgtgggcaagagcagatcctccgtgcactacagagaagaggaccggaagcggatcagctgcgtgaaggcctggtctaacagcagcagcaagcggctgttcagccagatcctgaaggacatcaaccacgccgctcctcggggcaagagacaggatctgagatctagactggccggctgcctggaacctttcggaatcgaactgctgctgatcgacaacgccgagaacctgcagagagaggccctgatcgatctgaagcagctgcacgaggaatccggcgtgccagtgattctcgttggaggccaggacctggatagcagcctgcagaatctggacctgctgacctgctttcccacactgttcgacttcgaccggctggactacgacgacttccagaaaaccctgcggaccatcgaactggatctgctggcactgccccagcctagcaatctgtctgagggcaccctgttcgagatcctggccacatctacccaggccagaatgggcgtgctgatcaagatcctgaccaagaccgtgctgcacagcctgaagaaaggccacggaaaggtggacgaggccatcctgcacaatatcgcctccagatacggcaagcagtacacaagccccgaggccagaaagaagcctggactgtctgaaggctga

SEQ ID NO: 230 - DNA, 564 bp, Artificial Sequence
  Synthetic
ctgaagtccatcttcctggaaggcgagagcgccatgagccacctggaagagaatgtgcccagactgggctacgtggaacccctggaacacgagagcatcagccactacctgggcagactgcggagattcaaggccaactctctgcccagcgcctactctctgggacaagccgctggaattggagccgtgacagccagatgggagaagctgtacttcaacccctttccaactgccgccgagctggaagccatcgagagactgatcggcctgaacaccggcagactggaagctatgctgccccacagaggcatgaccctgcagcctagacctatcagactgtgcggcgcctgctacaccgagtctccctgtcacagaatggaatggcagtacaaggacgtggtggccgtgtgtcctcaccactctctgagactgctggaaagatgccccagctgcaagacccctttcaagatccctgctctgtggaccgacggcacctgtgatcactgcggcatgagattcaccagcatggtcaagtaccaagagcggatcaagaaaaccggctga

SEQ ID NO: 231 - DNA, 500 bp, Artificial Sequence
  Synthetic
gagcgttacctcgttaagggtcgcttgatctgctaattctctcagcgctcgtgattcttggctatgaatttgctgatcagcgcagatgatatgggccagcagcaagaagccatagtctaatgctgcactagattgagaagatacaatagctaccatctggagattcttgttgaagtcttgatttatctagcgaacttctcacaggatgcccggatttgactctagtgcttcacacaatctctatctttgtattgcttaccgagagccgcttcgcctctcctccattactggcaaatttcctatcgtcatctaaactatttcagaaggaaagtggtatttttatactattcactttgaagtggcagcaaccttctatggacgaaagccaagttgcctgtttagatgctgacccacaagacttcgatgaagtggtgttgagcagtcatgccttcgacactgacccatccaaaatcctgatagactcatcagaccgtcacaaa

SEQ ID NO: 232 - DNA, 500 bp, Artificial Sequence
  Synthetic
gttgcaatcgccctcccaaaaacggatgggctgaagccatttttaattcttaaagctttggggggctgaaaggagcgctgcaatggcactgttaattgcattcagtcatacttaacagttgcgcctgtagcgacattattctgcgaattgtaaaagattcgccttttgcgacattattctgcaaatttcagtaagatacagcaaaaaagtccttaaacgacattaatttgcgaattgcgacatttaatgtgcgaacgtacagaaagaaatggagttaagcgggttcgaaccgctgacctctgcaatgccattgcagcgctctaccaactgagctataacccctcatttcgtattttatcatggcgcaatcctaatcattcagtcaagcgtcaactttggtaagctgataaacgtatcgcccctcaacagaaaatgagagccgtttgagacttatgactgagacaccccaagagttacctaattctgatcttgagacaggt

SEQ ID NO: 233 - DNA, 1662 bp, Artificial Sequence
  Synthetic
atgacggcagataaccatgatgcctctgcaattgtgaccgaactttcgcatgaggcaaaactgaagctagacattattgagagtttgctggaaccgtgcgatcgccaaacttacgggcaacgacttaaagaagctgccaataaacttggcaaatcagtaagaacggtgcagcgattggtagaaaagtgggaagcagaaggtttactagccttaactggcacagagagggcagataaaggcaagcatcgcatttctcaaaagtggcaagactttattatcaaaacctaccgtgaggggaataagtgtagtaagcggatgtcccgcaagcaggttgctttaagggttgaagttagagctaaggaattaggagaagaggattatccgaattaccgcacagtttatcgagtattacaacccttgattgaagcgcaagagcaaaagaaaggggttcgtagtccagggtggcgaggttcacacttatcggttaaaacccgcacaggcgagaatatttcagtggagtacagcaaccatgtgtggcagtgtgaccatacttgggtcgatgtgctggtcgttgatatagagggggtaattatcggtcgcccctggttaacgacagtaattgatacatactcacgctgcattatgggtattcgcgtggggtttgatgcaccgagtgctgaggtagtagcgttggcgttgcgtcatgcaatgctacccaaaaactatggggctgagtatgggttgcattgtcagtggggaacgtatggcaaaccagaatatttatttacagatggcggcaaagattttcgctcagaacacttaaagcaaattggcgtacagttaggttttagttgtattctacgcgatcgccctagtgaaggtggtgtggttgagcgcccgtttgggactttgaatacagagttatttgcaggattccctggatatgttggctcaaatgtccaacaacgtccagaacaagcggaaaaggaagcgtgtttaactttacgggaactagaaaagcggattgttcgctacatcgtagataactataatcaacgaattgataagcgcatgggagatcagatgcgctatcagcgttgggaagcaggtttattagccacaccagatttaattggtgagcgagatttagatatttgtttgatgaagcaaaccaatcgctcaatttaccgagagggttatatccgctttgagaatttgatgtatcaaggagagcatttagcgggatatgcaggggaacgggtggttttgcgctacgaccctagagacattaccagcgtgctggtttatcaacggcaaaaagataaagaaatatttttagcaggggcgaatgcgactgggttagagacagaacaagtatcgctagaagaagttaaggcaagtaataagaaggttagggaaaaaggaaaaacgattagtaatcattcgattttggaagaagtaagagacagagatatttttgttgccaagaagaagaccaagaaagaaaggcaaaaggaagaacaaaaacaattacactctgctgtcccgaaatccaagccttttgaggttgaaccagaaccagagattgaagatacgccagtacctaaaaagaaaccaagggtattgaattatgaccagttaaaagaggattatgggtggtaa

SEQ ID NO: 234 - protein, 553 aa, Artificial Sequence
  Synthetic
MTADNHDASAIVTELSHEAKLKLDIIESLLEPCDRQTYGQRLKEAANKLGKSVRTVQRLVEKWEAEGLLALTGTERADKGKHRISQKWQDFIIKTYREGNKCSKRMSRKQVALRVEVRAKELGEEDYPNYRTVYRVLQPLIEAQEQKKGVRSPGWRGSHLSVKTRTGENISVEYSNHVWQCDHTWVDVLVVDIEGVIIGRPWLTTVIDTYSRCIMGIRVGFDAPSAEVVALALRHAMLPKNYGAEYGLHCQWGTYGKPEYLFTDGGKDFRSEHLKQIGVQLGFSCILRDRPSEGGVVERPFGTLNTELFAGFPGYVGSNVQQRPEQAEKEACLTLRELEKRIVRYIVDNYNQRIDKRMGDQMRYQRWEAGLLATPDLIGERDLDICLMKQTNRSIYREGYIRFENLMYQGEHLAGYAGERVVLRYDPRDITSVLVYQRQKDKEIFLAGANATGLETEQVSLEEVKASNKKVREKGKTISNHSILEEVRDRDIFVAKKKTKKERQKEEQKQLHSAVPKSKPFEVEPEPEIEDTPVPKKKPRVLNYDQLKEDYGW

SEQ ID NO: 235 - DNA, 837 bp, Artificial Sequence
  Synthetic
atggcagaaaataaatctcaatctgttgccgaacaattaggagaaatcaagtctttagatggcaaattacaagcggaaattgaccgattaagagaaaaaattattgtagagttggagcaggttagcgacctccataattggttagaaggaaagcggcgatcgcgtcattcttgtaaaattgtcggggattcgcggacaggaaaaactgtagcttgtgattcttatagattaaggcacagaccaattcaagaagtaggaaaaccgccaactgtacctgtcgtgtatattcaacctccccaagaatgcagttcaagagagttatttcgggtgattattgagcatctgaaatacaaaatggtaaagggaacggtgggggaaatccgcagtaggacgctacaggttcttaaacgctgcaatgtagaaatgttgattattgatgaagcggatcggttaaagcccaaaacttttgcggatgtacgggatatttttgacaatttgggtatttctgtagtcttagtaggaacagatcgtctcaataccgtgattaaaagagatgaacaggtttataaccgtttccgtccttcttatccttttggtaggttgcaggggaataagtttaaggagacagtggagatttgggaacaggatattttgcgtttacctgtaccctcgaatcttggtagtaagccaatgttaaagatcctgggagaagcaacaggcggttacattgggttgatggatatgattttgcgtgaagcgggaattagggctttggaaaagggattaacgaagatcgatcgggaaactttggaagaggtagcacaggagtataagtga

SEQ ID NO: 236 - protein, 278 aa, Artificial Sequence
  Synthetic
MAENKSQSVAEQLGEIKSLDGKLQAEIDRLREKIIVELEQVSDLHNWLEGKRRSRHSCKIVGDSRTGKTVACDSYRLRHRPIQEVGKPPTVPVVYIQPPQECSSRELFRVIIEHLKYKMVKGTVGEIRSRTLQVLKRCNVEMLIIDEADRLKPKTFADVRDIFDNLGISVVLVGTDRLNTVIKRDEQVYNRFRPSYPFGRLQGNKFKETVEIWEQDILRLPVPSNLGSKPMLKILGEATGGYIGLMDMILREAGIRALEKGLTKIDRETLEEVAQEYK

SEQ ID NO: 237 - DNA, 510 bp, Artificial Sequence
  Synthetic
atggatcagattcaaccctggttgtttacgatcgcaccactagaaggagaaagtttaagtcattttctaggacgttttcggcgggaaaatgatttatcggcttcagggttaggaaaagaggcgggaattggtgctgttgtagcacgatgggaaaagttctatctcaatccgtttccctcgcttagagagttggaagcattggctaaggtggttcaggtggatagcgatcgcttgcgggagatgttaccacctgaaggggtggggatgaagcacgaaccaattcgcctctgtggggcgtgttatgccgagtcgccttgtcacaagattaaatggcagtttaagaagacgcagggatgcgatcgccaccagctaagtttactttcagaatgccctaactgtggagcaaggtttaaaattccggctttatgggcagatggatggtgtcagcgttgttttacaacttttgcagaaatgggaaaaatgcaaaagggtcaaagaaacagtctgtga

SEQ ID NO: 238 - protein, 169 aa, Artificial Sequence
  Synthetic
MDQIQPWLFTIAPLEGESLSHFLGRFRRENDLSASGLGKEAGIGAVVARWEKFYLNPFPSLRELEALAKVVQVDSDRLREMLPPEGVGMKHEPIRLCGACYAESPCHKIKWQFKKTQGCDRHQLSLLSECPNCGARFKIPALWADGWCQRCFTTFAEMGKMQKGQRNSL

SEQ ID NO: 239 - DNA, 1695 bp, Artificial Sequence
  Synthetic
atgtctaatgctcatccctcagaaacgattccagatgagaggggcaacctcgaagaagccaataccatcgcctctgagttttccgacgaggcgaagctcaagatcgaagtgattcaaagccttatggaggcaggcgatcgcgccacgtatgcccaaaagcttaaagaagctgctcaaaaactgggcaagtcggtgcggacggtgcggcggttagtggataaatgggaagaacaagggctgtcgggtctggttgaaactgaacgctctgataaaggtaagcaccgagttgatactgactggcaagatttaattctcacaacctatcgggaaggaaataagggcagtaaacggatgaccccgaagcaggttttcctaagagtacaagcaaaagctcacgaattaggggtcaagtctcccagccacatgacggtgtaccgcatcctcaaccctttaattgaaaaacaagaaaaagccaaaagcattcgcagtccgggatggcgaggatcgcgtttgtcggttaaaactcgcgacggtgcagatttggcagtggagtacagcaaccaggtgtggcaatgcgatcacactcgcgctgatctgttgctagtggatcagcatggggaaattttaggtcgtccttggttgaccacggttattgatacctattctcgctgcattctgggcattaatttaggctttgacgctcccagttctcaggtagtggctttagctttgcgccatgctattttgccgaagcaatacggtgcagaatatggtctgcattgccagtggggaacttatgggaagccagagcatttttatactgatggcggtaaggattttcgttcggaacatttgcagcaaataggagtgcagttagggtttgtttgccatttgcgcgatcgcccctctgaaggtggtattgtcgagcgtccctttggcacattgaacaccgagctattttccactttgccgggatatacggggtcaaatgtacaaaagcggccggaagatgcagaaaaagaagcctgtttgactctgcggcagttagagcagcatttagtccgctatcttgttgataactacaatcagcgtcttgacgctcggatgggcgaccaaacaaggtttcaacgatgggaagctggtttacttgctatgccacctttaatctcagaaagagatttggatatttgcttgatgaaacagtcgaggcgaattattcaaagggggggctacttacaatttgaaaactttatgtatcggggtgaatatttggcgggttacgcaggggaaagtgtagtgctgcgatatgaccccaaagatattacaaggcttttggtttaccgcaatgagggtagtaaggaggtatttttagcccgtgcagtagcacaagatttagaagctgaagaactatctttagatgaggcgaaagctagcagccgcaaggttcgggaagctgggaaggcggttagtaaccgttcgattttggatgaggtgcgcgatcgcgacactttcgtcactcagaagaaaacgaaaaaggaacgccaaaaggctgaacaaggtgaaatccgtaaggcaaaacagcctgtatctatggaaccggaaccggaggaagtggtatcgaacaacagtgaagctgaaccagaaatgccggaagtattggattacgaacaaatgcgcgaagattacgggtggtaa

SEQ ID NO: 240 - protein, 564 aa, Artificial Sequence
  Synthetic
MSNAHPSETIPDERGNLEEANTIASEFSDEAKLKIEVIQSLMEAGDRATYAQKLKEAAQKLGKSVRTVRRLVDKWEEQGLSGLVETERSDKGKHRVDTDWQDLILTTYREGNKGSKRMTPKQVFLRVQAKAHELGVKSPSHMTVYRILNPLIEKQEKAKSIRSPGWRGSRLSVKTRDGADLAVEYSNQVWQCDHTRADLLLVDQHGEILGRPWLTTVIDTYSRCILGINLGFDAPSSQVVALALRHAILPKQYGAEYGLHCQWGTYGKPEHFYTDGGKDFRSEHLQQIGVQLGFVCHLRDRPSEGGIVERPFGTLNTELFSTLPGYTGSNVQKRPEDAEKEACLTLRQLEQHLVRYLVDNYNQRLDARMGDQTRFQRWEAGLLAMPPLISERDLDICLMKQSRRIIQRGGYLQFENFMYRGEYLAGYAGESVVLRYDPKDITRLLVYRNEGSKEVFLARAVAQDLEAEELSLDEAKASSRKVREAGKAVSNRSILDEVRDRDTFVTQKKTKKERQKAEQGEIRKAKQPVSMEPEPEEVVSNNSEAEPEMPEVLDYEQMREDYGW

SEQ ID NO: 241 - DNA, 837 bp, Artificial Sequence
  Synthetic
atgacgaatcaagaagcccaagcagtcgccaaggaattaggcgatattccgcttaatcaagaaaaaattcaagcggaaattcaaagattgaaccgcaagacttttgtgcagttggaacaggtgaaaattctccatgactggctggaaggaaagcgacagtctcggcagtcggggcgagttgtgggcgagtcgaggacgggcaaaactatggggtgtgatgcttacaggttacggcacaaacccaagcagcagccgggacagccgccaacggttcctgtggcttacatccaaattccgcaagagtgtggcgcgaaggaattgtttggggtgcttcttgagcatttgaagtatcaggtggttaagggaacgatcgccgaaattcgcgatcgcacgatgcgggtgctcaagggttgctgcgtggagatgctgattattgatgaagcggatcggtttaaacctaagacgtttgctgaggtgcgcgatatttttgataggttggaaattccggtgattttggtaggaaccgatcgcttagatgcggtgattaagcgggatgaacaggtttataaccgttttcggtcaagtcatcggtttggtaagttgtcgggcgaggagtttaagcggacggtggaggtttgggaaaagagggttttgctgttacctgtggcttctaatctttctagtaaggcgatgttgaagaccttgggggaggcgactgggggttatgtggggctattggatatgattctccgagaggcggcgattcgggctctgaagaaggggttatcaaggattgatttggaaactcttaaagaagttgctgcggagtacaagtga

SEQ ID NO: 242 - protein, 278 aa, Artificial Sequence
  Synthetic
MTNQEAQAVAKELGDIPLNQEKIQAEIQRLNRKTFVQLEQVKILHDWLEGKRQSRQSGRVVGESRTGKTMGCDAYRLRHKPKQQPGQPPTVPVAYIQIPQECGAKELFGVLLEHLKYQVVKGTIAEIRDRTMRVLKGCCVEMLIIDEADRFKPKTFAEVRDIFDRLEIPVILVGTDRLDAVIKRDEQVYNRFRSSHRFGKLSGEEFKRTVEVWEKRVLLLPVASNLSSKAMLKTLGEATGGYVGLLDMILREAAIRALKKGLSRIDLETLKEVAAEYK

SEQ ID NO: 243 - DNA, 510 bp, Artificial Sequence
  Synthetic
atggaagcgatcgatatccagccttggctgtttcgggtggaaccgttggagggagagagtttgagccattttttggggcggtttcgacgggcgaataagttaacgccgaatgggttgggtaagatggcggggttgggaggcgcgatcgcccgttgggaaaagtttcgctttaatccgcctccttctcctcagcagttggatgcgttggcggcggtggtgggagttgaaaaggaacagttacaggaaatgttaccgcctcctggggtggggatgaagttagagccgattcggttgtgtggggcgtgttatgcccagtcgccttgtcatcagattgaatggcagtttaagacgacacaaggatgcgatcggcacaaattacgcttgctgtcggagtgtcccaactgcggggcgaggtttaagattccggcgttgtgggtggatgggtggtgttctcggtgttttttgtcctttaaagatatagtaaagtggcagaaaactactttgccataa

SEQ ID NO: 244 - protein, 169 aa, Artificial Sequence
  Synthetic
MEAIDIQPWLFRVEPLEGESLSHFLGRFRRANKLTPNGLGKMAGLGGAIARWEKFRFNPPPSPQQLDALAAVVGVEKEQLQEMLPPPGVGMKLEPIRLCGACYAQSPCHQIEWQFKTTQGCDRHKLRLLSECPNCGARFKIPALWVDGWCSRCFLSFKDIVKWQKTTLP

SEQ ID NO: 245 - DNA, 1695 bp, Artificial Sequence
  Synthetic
atgttgaatcagcagccaacagatccggtagcaccggagagtaatgaaataattgccacgctttcagccaatgcgaaatttcggctagaagtgctacagacgctggttgttccgggcaatcggacaacctatggagaacgattgcgagaagcagcccaaaaacttgggaaatcgatccggactgtgcagcggatggtcaaggactgggaacgaaatggcttgtcagccttggaaggtggtgcaagagcggataaagggcaaccacgcattgggcaagagtggcaagatttcattatcaagacctaccagagtggcactaaagacagcaagcgtattactccggcacaggtggcggttcgggttaaggtacgggcacagcaattgggcgtagagaaatatcccagccacatgacggtttatcggattctggagccgctgatcgcgaaaaaggagcagcagaataataagcgaagtattggctggcgaggctcgcggctttcgctctcaaccagggcaggacaggatttagcaattgagtatagcaatcatgtttggcaatgtgaccacactcgtgcggacgttttgctggttgaccagcatggggaaatgttgggacggccttggctgacgacggtaatcgatacctattcccggtgcattgttgggattaatttggggtttgatgcacccagttctcagcttgtggcgttggccttgcgtcatgcaatgttgccgaaacgctatgggagcgaatatgggctgaattgtgagtggggaacctccgggaagccggagcatttctttacggatggtggcaaggattttcgatcggatcatattcagcaagtctcaatgcagattgggtttgtttgccacttgcgcgatcggccttcggaaggaggcgtagttgagcggccatttggcacgttgaatactgagtttttctcacacttgcctggatatacggggtcaaatgtccaagatcggccagaggaagcggagaaatcagcttgtttgaccctgagagaactggagcagcaactggttcggtacttggtggataactataaccagcggctggatgcccggatgaaggatcaaacgcgctttcaacggtgggaggcggggttaattgctaatcccgatatttttacggagcgggaattggatatttgcctgatgaagcaaacccgacggacggtttaccgagagggctatctacgctttgagaatttgacctatcggggagagaatctggctggctatgctggtgaaacagtggtgctgcggtttgacccacgggatattacgacgatttatgtttaccggactgagggggagaaggaggtctttcttaccaatgctcatgctcaggatttggaaactgagacgatcgcgcttgatgaagcgaaagccagtagccgcagggtgcgggaggcgggaaaaaccattagcaatcgatcgattctagaggaggtgcgcgatcgggatgtatttgtcgagaagaagcagaagggtcggaaggcaaggcaaaaagcagaacaggaacgcttgcccagtcggcctcaaccgcagtcggtagaaattgcggcggttgaaccggacgaaatcgtcgaaaagactggggtggatgaatcctgggtaatgccagaggttatggattatgaccaactacatgatgattttgggtggtaa

SEQ ID NO: 246 - protein, 564 aa, Artificial Sequence
  Synthetic
MLNQQPTDPVAPESNEIIATLSANAKFRLEVLQTLVVPGNRTTYGERLREAAQKLGKSIRTVQRMVKDWERNGLSALEGGARADKGQPRIGQEWQDFIIKTYQSGTKDSKRITPAQVAVRVKVRAQQLGVEKYPSHMTVYRILEPLIAKKEQQNNKRSIGWRGSRLSLSTRAGQDLAIEYSNHVWQCDHTRADVLLVDQHGEMLGRPWLTTVIDTYSRCIVGINLGFDAPSSQLVALALRHAMLPKRYGSEYGLNCEWGTSGKPEHFFTDGGKDFRSDHIQQVSMQIGFVCHLRDRPSEGGVVERPFGTLNTEFFSHLPGYTGSNVQDRPEEAEKSACLTLRELEQQLVRYLVDNYNQRLDARMKDQTRFQRWEAGLIANPDIFTERELDICLMKQTRRTVYREGYLRFENLTYRGENLAGYAGETVVLRFDPRDITTIYVYRTEGEKEVFLTNAHAQDLETETIALDEAKASSRRVREAGKTISNRSILEEVRDRDVFVEKKQKGRKARQKAEQERLPSRPQPQSVEIAAVEPDEIVEKTGVDESWVMPEVMDYDQLHDDFGW

SEQ ID NO: 247 - DNA, 840 bp, Artificial Sequence
  Synthetic
atgacgacagttcaagcagcacagaccgttgcggatcacttggggccagtggcattggccagtgagaaggttcaagccgagatagctcggttaaaccgcaagagttttgtcgaattggctcaagtgcaaagcctgcatggttggctggaaagtaaacggcagtcgaagcaatgctgtcgtgtcgtgggggaatcacggacggggaaaaccttggcttgtgatgcttatcggctacgccataggccgagccaacaaccaggaaagccgccgatcgtacccgtgatttacattcaagtgccgcaggaatgtggatcgaaggaactgttccaaatcatcatcgagcatcttaagtatcagatggtgaaggggacggtggcagaaattcgggaacggacaatgcgagcgctgaagggttgtggggtagagatgctgatcattgatgaggccgatcggttgaagcccaagacttttgcggatgtgcgggatatttttgacaaactggagattgcggtggtgctggtgggtaccgatcggctggatgtggtggtgaagcgggatgagcaggtttacaaccgttttcgggcctgtcatcggtttgggaagttggcgggggaggagtttcaacggacgatcgaggtgtgggaaaagcaggtgctgaagttacctgtggcctcgaatttgacgagtaagtcgatgatgaaggtgattggagaggcgacggcagggtatatcgggttgatggatatgattttgcgggaggcggcgattcgatcgttgaagaagggattgccgaagattgatttggagacgctgaaggaagtggcggcggagtatcgatga

SEQ ID NO: 248 - protein, 279 aa, Artificial Sequence
  Synthetic
MTTVQAAQTVADHLGPVALASEKVQAEIARLNRKSFVELAQVQSLHGWLESKRQSKQCCRVVGESRTGKTLACDAYRLRHRPSQQPGKPPIVPVIYIQVPQECGSKELFQIIIEHLKYQMVKGTVAEIRERTMRALKGCGVEMLIIDEADRLKPKTFADVRDIFDKLEIAVVLVGTDRLDVVVKRDEQVYNRFRACHRFGKLAGEEFQRTIEVWEKQVLKLPVASNLTSKSMMKVIGEATAGYIGLMDMILREAAIRSLKKGLPKIDLETLKEVAAEYR

SEQ ID NO: 249 - DNA, 510 bp, Artificial Sequence
  Synthetic
atgatggacgatctagagattcagccttggtttttccaagtggaaccttatgagggggagagtattagccattttttggggcggtttcggcgggcaaatgagctaactccgggtgggttggggcagatggcggggttgggggcggcgatcgggcggtgggagaagtttcggtttaatcctcgtccgacgggggagcagttggagaaactggcggtggtggttggggtgccgacggagcggctatggcagatgttgccgggggatggggtggggatgaagatggagccgattcggttgtgtggggcttgctatggggaggtagcttgtcatcggattgagtggcagcttaaggagacaagtgggtgcgatcgccaccaattgcggttgctatcggaatgccctacttgtggagcaaggttttcagttccagcttcgtgggttgagggtaattgtaagcggtgctttactcctttttcagcaatggctatgcatcagaaatcgattgcttga

SEQ ID NO: 250 - protein, 169 aa, Artificial Sequence
  Synthetic
MMDDLEIQPWFFQVEPYEGESISHFLGRFRRANELTPGGLGQMAGLGAAIGRWEKFRFNPRPTGEQLEKLAVVVGVPTERLWQMLPGDGVGMKMEPIRLCGACYGEVACHRIEWQLKETSGCDRHQLRLLSECPTCGARFSVPASWVEGNCKRCFTPFSAMAMHQKSIA

SEQ ID NO: 251 - DNA, 1866 bp, Artificial Sequence
  Synthetic
atggatgaaagccaaattgcattagaagctgatttgcagggattcgatgaggttttgttgagcgatcgagcctttgacaccgatccatcccaaattttaattgaatcgtcagatccacagaagttacgctttcgtctaattgagtggctagcggaggctcccaatcggaaagtgaaggcggaacggaaaaagaagatcgctgaaacgctcgatatatcaactcgtcaggtagagcggttgctcgatcgatacaatgatgagcagttacatgaaactgccggaatcgatcgttcagacaaagggcaacatcggattggcgactattggcccgaatatatccgcagtgtctatgaacaaagtgtcaaagataaacacccgctcactccagcgaatattgtgcgagaggttcaccgtcacgcattaatcgatcttcggcatgaagaaggtgactatcctcatcaagcaactatctaccggattctaaaacctctcatcgaacagcagaagcgaaaaagtaagattcgcaatccaggatcgggatcttggatgagtgttgaaacacgggacggaaagttgctcaaggcggattttagcaatcagatcgttcagtgcgaccatacaaagttagatgttcggatcgtcgatgaggatggcaagcttttaaactggcgaccttggcttaccactgttgtcgatactttctcaagctgtctgattggctatcatttgtggcataaacagccaggatctcatgaagttgcacttaccctcagacatgcagcattacccaagaattatccgccagaatatgagcttcagaagtcgtgggacatctgtggattgccactccagtatttttttactgatggcggcagagatttagctaaatcgaaactcatcaaggcttttggcaataagttcggttttcagtgcgaactgcgagatcgaccgattcaaggtgggattgttgagcgactattcgggacaattaatacacaggttttacaacctctggctggctacatatcaccagaagaagatggcgcaaaacgggcagaaaaggaggcttgtctaactattgaagatgttgacaagattctagccgcttacttctgtgacgactacaatcatcagccatatcctaaagatccccgtgatacccgctatgagaaatggttaagaggaatggggggcaagttgccagaaacactggatgagcgagatctagatattctccttactaaggaaaaacaaaaactcgttcaggagtatggatctatttattttgaaactctaacataccaatgtaaagaattggagccatttaaaggtcaatatgtcaccgtaacctacgatcccgaccatgttctgacgttatatatttacactcaacctattggcgagcgagagagtgaatttatctgctgtgttcatgccaataacatggacattcaagatttgagcctgtatgagctgaaacaatttaacaaggagaaaagtacaacgaaacgagagcactcaaattatagtgcggctatagctttggataaacgacaaaagcttgtagcagaaaggaagcagggcaagaaggagcgtcaacaggcagggcagaaggaactgcgaggaaaaagtaagcagaactcgaatgtggtggaaatgcggaaggttcgagctggtaaatctgctagaaacaacgaaccgatggaactcttgccagaaagggttactcccgaacagatgaagcctcagcctctggtagcgttatctcctgcacccattcttgagcctgatgcttctacacctcgaacgaccgaacggcatcgacttgttattgctaaaaatcaaaaaatgaagagggactggtaa

SEQ ID NO: 252 - protein, 621 aa, Artificial Sequence
  Synthetic
MDESQIALEADLQGFDEVLLSDRAFDTDPSQILIESSDPQKLRFRLIEWLAEAPNRKVKAERKKKIAETLDISTRQVERLLDRYNDEQLHETAGIDRSDKGQHRIGDYWPEYIRSVYEQSVKDKHPLTPANIVREVHRHALIDLRHEEGDYPHQATIYRILKPLIEQQKRKSKIRNPGSGSWMSVETRDGKLLKADFSNQIVQCDHTKLDVRIVDEDGKLLNWRPWLTTVVDTFSSCLIGYHLWHKQPGSHEVALTLRHAALPKNYPPEYELQKSWDICGLPLQYFFTDGGRDLAKSKLIKAFGNKFGFQCELRDRPIQGGIVERLFGTINTQVLQPLAGYISPEEDGAKRAEKEACLTIEDVDKILAAYFCDDYNHQPYPKDPRDTRYEKWLRGMGGKLPETLDERDLDILLTKEKQKLVQEYGSIYFETLTYQCKELEPFKGQYVTVTYDPDHVLTLYIYTQPIGERESEFICCVHANNMDIQDLSLYELKQFNKEKSTTKREHSNYSAAIALDKRQKLVAERKQGKKERQQAGQKELRGKSKQNSNVVEMRKVRAGKSARNNEPMELLPERVTPEQMKPQPLVALSPAPILEPDASTPRTTERHRLVIAKNQKMKRDW

SEQ ID NO: 253 - DNA, 867 bp, Artificial Sequence
  Synthetic
atggcacaatcagaactggcaattcacgttcctgttgaagttttaactacccagttagatatgactgacttgctggctaaagcagcaacgatcgaggagctattcaagacggcatttattccaaccgatcgacattcagagtatgctcgatggatagatgaattacgaattctcaaacattgtggtcgagcgatcgggccaagagatgtggggaaaagtcgttcgtcagtaaattatcgagaggaggatataaagcgggtttcatgtgttaaggcatggtcaaattcaagctctaagcggttgttttcacaaatcctcaaagacattaaccatgcagcttggagaggtaagccaaaagatttacaagctagattagctggctgtttagaactatttgggattgagctgctgttaattgataatgctgataatttacaacgggaggctttgattgacctaaagcagcttcatgaagaatctggagtgccgatcgtcttaattggtgggcaggatcttgacaacaccctggtaaatttcgatttactgacttgttttccgacattatttgagtttgatgctctaggtgaagaggacttaaagaaaacattggagacgatcgaattagatattctggcacttccccaagcatctaatttgtcggaaggaaggctatttgaaattttgcgagatagttctcaaactcgaattggtattttgattaaaatcctatcaaagactgttctacattcgttgaaaaaaggtcatggaaaggttgaggaagagattctgagaaatattgctaatcggtatgggcgacggtacgttccgttggaagctagaaataagccgcagtcgatcgagggttga

SEQ ID NO: 254 - protein, 288 aa, Artificial Sequence
  Synthetic
MAQSELAIHVPVEVLTTQLDMTDLLAKAATIEELFKTAFIPTDRHSEYARWIDELRILKHCGRAIGPRDVGKSRSSVNYREEDIKRVSCVKAWSNSSSKRLFSQILKDINHAAWRGKPKDLQARLAGCLELFGIELLLIDNADNLQREALIDLKQLHEESGVPIVLIGGQDLDNTLVNFDLLTCFPTLFEFDALGEEDLKKTLETIELDILALPQASNLSEGRLFEILRDSSQTRIGILIKILSKTVLHSLKKGHGKVEEEILRNIANRYGRRYVPLEARNKPQSIEG

SEQ ID NO: 255 - DNA, 546 bp, Artificial Sequence
  Synthetic
atgggagagtctgctttgagtcagcttgacgatcgagtgccctggctaggttatgtggaaccatttgagcatgaaagtatcagccattatctcggacggttgcggcgatttaaggcgaatagtctgccgtcggcttatgcgctagggcaggcggcagggattgggggcataacggttagatgggagaagctgtatttcaatccatttccgactgatgaggagttgggatcgatcgccagtttaatcggtttagatttgtcgcggtttcaggatatgttgccgagccgagaaatcacgtttcaacctcgcccgattcggctctgtgtggcttgttatggagaaagtccaggtcatcggatggaatggcagtacaaggatgttgtggcggtttgtcagcgtcacagtctgcgactattggagcgatgcccacaatgcaagaagccgtttgagattccagcgttatggactgccgatcgatgccatcactgtgggatgcggtttacgtcgatggtgaagtatcaggagagaatcaataaagctatctga

SEQ ID NO: 256 - protein, 181 aa, Artificial Sequence
  Synthetic
MGESALSQLDDRVPWLGYVEPFEHESISHYLGRLRRFKANSLPSAYALGQAAGIGGITVRWEKLYFNPFPTDEELGSIASLIGLDLSRFQDMLPSREITFQPRPIRLCVACYGESPGHRMEWQYKDVVAVCQRHSLRLLERCPQCKKPFEIPALWTADRCHHCGMRFTSMVKYQERINKAI

SEQ ID NO: 257 - DNA, 1797 bp, Artificial Sequence
  Synthetic
atgtacccgcacaatagcgaattactattttgtctaagtcccactatggatgaaatacctatcttcaatcaagacaaagaatctctgccatttgatgacaacaatgatttggcagaaattcagaatgatgagtcagaagaaacaaacgtaattattaccgaactttcggctgaagcaaaactcaagatggaagtgattcaaggtctacttgaaccatgcgatcgcaaaacctatggtcagaaattaagagtagcagcagaaaaactgggcaagactgtcagaactgtccagcgtttagttaaaaagtatcaacaagacggtctatccgcaattgttgacactgagagaaatgataaaggcagttatcggatagaccctgagtggcaaaaatttattatcagcacttttaaagaaggtaataagggtagtaaaaaaatgactccggctcaagtagcaatcagggtacaagtcagagcaggacagctaggtttagaagattaccccagtcacatgacagtttacagagttcttaaccctattattgagcggaaagagcaaaaacagaaagtacggaatgttggatggcgggggtcacgagtatcccacaaaactcgtgatgggcaaacattagatgtacatcatagtaatcatgtttggcagtgtgaccatacaaaactagatgtcatgttggttgatcaatatggtgagcctttgtctcgcccttggttcaccaaaattacagacagttactctcgttgtatcatgggtattcatttgggctttgacgcaccaagttctcaagtggtagccctagcattacgccatgctattttgccaaagcagtatagtgcggaatacaaacttcattgtgaatgggcaacttatggtgtacctgaaaatcttttcactgatggtggtagagattttcgctcagaccacttaaaacagattggtttccaattaggttttgagtgtcatttacgcgatcgccccagtgaaggtggtattgaagaacgtagttttggcactatcaatacagaatttctctctggtttctatggctatttaggctctaatattcaggaacgccctaagacggcagaagaagaagcttgcttgactttacgggaactacacctattgttagttcgctacattattgacaactataatcagcgtcttgatgcacgtacaaaagagcaatcaaggtttcaaagatgggaagcaggattacctgctctacccaaaatggtgaaggagcgcgaattagatgtctgtttgatgaaaaaaactcgacgcagtatttacaaaggcggatatctcagctttgaaaatattatgtatcgaggagactacctagcagcttacgctggggaaagtattgtactcagatatgatcccagggatattacaagtgtttgggtttatcgaatagataaaggtaaggaagagcttctttctgctgctcatgcgttggattgggaaacagagcaattatctttagaagaggctaaagctgctagtcgaaaagtgcgttctgtgggtaaaacactcagcaataaatccattttagcagagatacacgatagagatactttcatcaagcaaaagaaaaagactcagaaggaacgcaaaaaagaagaacaggctcaagttcatcctgtttatgaatccatcaatctcagtgataccgaactggtagaaattccagaagaaacgcctaaaactcaagcaccacaatctcgaagacctagagttttcaactatgaacaactacgtcaagactatgatgagtag

SEQ ID NO: 258 - protein, 598 aa, Artificial Sequence
  Synthetic
MYPHNSELLFCLSPTMDEIPIFNQDKESLPFDDNNDLAEIQNDESEETNVIITELSAEAKLKMEVIQGLLEPCDRKTYGQKLRVAAEKLGKTVRTVQRLVKKYQQDGLSAIVDTERNDKGSYRIDPEWQKFIISTFKEGNKGSKKMTPAQVAIRVQVRAGQLGLEDYPSHMTVYRVLNPIIERKEQKQKVRNVGWRGSRVSHKTRDGQTLDVHHSNHVWQCDHTKLDVMLVDQYGEPLSRPWFTKITDSYSRCIMGIHLGFDAPSSQVVALALRHAILPKQYSAEYKLHCEWATYGVPENLFTDGGRDFRSDHLKQIGFQLGFECHLRDRPSEGGIEERSFGTINTEFLSGFYGYLGSNIQERPKTAEEEACLTLRELHLLLVRYIIDNYNQRLDARTKEQSRFQRWEAGLPALPKMVKERELDVCLMKKTRRSIYKGGYLSFENIMYRGDYLAAYAGESIVLRYDPRDITSVWVYRIDKGKEELLSAAHALDWETEQLSLEEAKAASRKVRSVGKTLSNKSILAEIHDRDTFIKQKKKTQKERKKEEQAQVHPVYESINLSDTELVEIPEETPKTQAPQSRRPRVFNYEQLRQDYDE

SEQ ID NO: 259 - DNA, 837 bp, Artificial Sequence
  Synthetic
atgaaagacgattattggcagaaatgggtacaaaatttatggggagatgaaccaattccagaggaattacagccagaaattgaacgtctactgactcccagtattgtggaattagatcatatacaaaaaatccatgattggttagatggtttgcgtctttccaaacaatgtggtcgaattgttgcacctccacgagcaggtaagtcggtttcttgtgatgtatatagactattaaataagccacaaaaaagaggaggtaaaaaagatattgtacctgttttgtatatgcaagttccaggagattgctcatcgggtgaattattagttctgattctggaaagtttgaaatatgagtcaactaccggaaaacttactgatatcagaagacgggtacaaagactactcaaagaatctaaagtggaaatgctaattattgatgaagcaaattttctcaagttgaatacttttagtgaaattgcccgaatttacgacttgctgagaatttccattgttcttgtaggtacggatggtttggataatctaattaaaaaagagccttacattcatgatcgatttattgaatgttatagattaccattagtatcagagaaaagattttctgaattagtaaaaatttgggaagaagaggttttacgtttacctctcccttctaatctcacaagaaatgaaactttattacctttgtatcaaaaaaccagtggcaaaattggtttagtagatcgggtattgagaagagcttcaattttagccttgagaaaaggattgaagaaaatagataaagagactttaactgaagttttagattggtttgaataa

SEQ ID NO: 260 - protein, 278 aa, Artificial Sequence
  Synthetic
MKDDYWQKWVQNLWGDEPIPEELQPEIERLLTPSIVELDHIQKIHDWLDGLRLSKQCGRIVAPPRAGKSVSCDVYRLLNKPQKRGGKKDIVPVLYMQVPGDCSSGELLVLILESLKYESTTGKLTDIRRRVQRLLKESKVEMLIIDEANFLKLNTFSEIARIYDLLRISIVLVGTDGLDNLIKKEPYIHDRFIECYRLPLVSEKRFSELVKIWEEEVLRLPLPSNLTRNETLLPLYQKTSGKIGLVDRVLRRASILALRKGLKKIDKETLTEVLDWFE

SEQ ID NO: 261 - DNA, 525 bp, Artificial Sequence
  Synthetic
atggaaattgctgcggatgaacctcgtttttttgaggtagaacccctggatggagaaagtttaagtcatttcttaggtcgttttcgccgagaaaattatttaacctctacccagttgggtaaattgactggactcggtgcagttattttacgttgggaaaagttgtatttcaatccttttcctactctacaagagttggaggctttgtcctctgtggtgggagttaatgtggataggttaatggagatgctcccatctcagggaatgacgatgaagcctagaccaattaggttatgtggggcttgctatgcagaatctccttgtcatcgggttgattggcagttaaaggataaaatcaggtgtgatggctacactggacgaagacatccccataatttacgcttgttaacgaagtgtactaactgtgaaacaccttttcctattcccgcagattgggtacaaggtgaatgtcctcactgtttcctgccttttgtaacaatggcgaagcgtcagaagcctagctaa

SEQ ID NO: 262 - protein, 174 aa, Artificial Sequence
  Synthetic
MEIAADEPRFFEVEPLDGESLSHFLGRFRRENYLTSTQLGKLTGLGAVILRWEKLYFNPFPTLQELEALSSVVGVNVDRLMEMLPSQGMTMKPRPIRLCGACYAESPCHRVDWQLKDKIRCDGYTGRRHPHNLRLLTKCTNCETPFPIPADWVQGECPHCFLPFVTMAKRQKPS

SEQ ID NO: 263 - DNA, 1680 bp, Artificial Sequence
  Synthetic
atgctggacgatcataccaatagcgagcaagaggcagaaaaggatgagatcgtgacggaactctcagcagctgataggcatttgctggatatgattcagcaactactagaaccgtgcgatcgcatcacctatggagaaagacaaagggaggtcgcagccaaactaggcaagtctgtgcgaacggtacggcgactggtaaaaaaatgggaagaggaaggtttagctgcacttcaaactacgacacgggctgacaaaggcaaacatcgaatagacactgattggcaacagttcatcatcaaaacttataaggaaggcaataaaggtagtaagcgaattactccccaacaagtggcaatcagagtacaagcaagggcggctgaattaggacaaaaaaaatatcccagctataggactgtgtatcgagttctacaacccattattgagcagcaagaacaaaaagcaggtgttagaagtcgaggttggcatggttctcgattatcagttaaaacccgcgatggtaaagacttatcagtagaatatagcaaccatgtttggcagtgtgaccatactcgtgtagacctattgctggtagatcagcatggtgaacttttggctcgtccttggctgacaactgttgttgatacttactcccgttgcatcatggggataaacttaggctttgatcctccgagttctcaggtagtagcattagcactgcgccatgcaattttgccaaagcagtatgggtcagaatatggacttcatgaagaatggggaacctacgggaaaccagaacatttttataccgatggtggtaaagattttcgctcaaaccatttgcaacagataggtgtgcaattgggatttgtttgtcatttacgcgatcgccccagtgaaggtggtattgttgagcgtccttttggcacttttaataccgacttcttttctaatatgccgggatacacaggatcaaatgtgcaggaacgtccagagcaagctgagaaggaggcttgtctgactttacgggagttggaacataggtttgtacgctacatcgtggataaatataaccagcgtcctgatgcgcgtcttggcgatcaaactcgctatcaacgatgggaagcagggttaattgcttctcctaatgtaatttcagaagaggagttacgtatttgcctgatgaagcaaactcgacgctctatttatagaggtggatatctgcaatttgaaaatctgacgtatcggggagaaaatttggcaggttatgcaggtgaaagcgttgtactgcgctatgaccccaaagacattacaactgtgttggtttaccgccaaagtggtaataaagaagagtttttagctagggcatttgctcaggagttggagactgagcaattatctttggatgaggctaaagctagtagtcgtaagattcggcaagcagggaagatgattagcaatcgctcaatgttggcagaggtacgcgatcgcgaaactttcctgacccaaaagaaaaccaaaaaggaacgtcaaaaagcggaacaggctgtagtacaaaaagctaaacaaccattgatagttgaaccagaagaaattgaagtggcattgtttgatagtgagccagaataccagatgccagaggcctttgattacgaacaaatgcgtgaagattacgggtggtaa

SEQ ID NO: 264 - protein, 559 aa, Artificial Sequence
  Synthetic
MLDDHTNSEQEAEKDEIVTELSAADRHLLDMIQQLLEPCDRITYGERQREVAAKLGKSVRTVRRLVKKWEEEGLAALQTTTRADKGKHRIDTDWQQFIIKTYKEGNKGSKRITPQQVAIRVQARAAELGQKKYPSYRTVYRVLQPIIEQQEQKAGVRSRGWHGSRLSVKTRDGKDLSVEYSNHVWQCDHTRVDLLLVDQHGELLARPWLTTVVDTYSRCIMGINLGFDPPSSQVVALALRHAILPKQYGSEYGLHEEWGTYGKPEHFYTDGGKDFRSNHLQQIGVQLGFVCHLRDRPSEGGIVERPFGTFNTDFFSNMPGYTGSNVQERPEQAEKEACLTLRELEHRFVRYIVDKYNQRPDARLGDQTRYQRWEAGLIASPNVISEEELRICLMKQTRRSIYRGGYLQFENLTYRGENLAGYAGESVVLRYDPKDITTVLVYRQSGNKEEFLARAFAQELETEQLSLDEAKASSRKIRQAGKMISNRSMLAEVRDRETFLTQKKTKKERQKAEQAVVQKAKQPLIVEPEEIEVALFDSEPEYQMPEAFDYEQMREDYGW

SEQ ID NO: 265 - DNA, 840 bp, Artificial Sequence
  Synthetic
atgacttcaaaacaagctcaagcagttgcccaacaattaggtgaaatttcagccaatggtgaaaaattacaagcagaaattcaaagattgaaccggaagacttgtatcctcttggagcaagttaaaattcttaatgactggctagaaggaaagcgtcaagcacgtcagtctggtcgtattgtaggagagtccagaactggtaaaacaatgggttgtgatgcctacagactccggcataaacccaagcaagaggtaggaaaaccaccattcgtgcctattgcttttctcgaagacattccgtctgattgtagtgctaaagatttgttcaatgagattcttaagcatttaaagtatcagatgaataagggaactgtagctgagattagagaacgcacatttcgagttcttaaaggttgcggggttgagatgctgatcattgatgaagctgaccgcttgaaacccaaaacttttgctgaagtgcgagatatttttgacaagttagaaattgcggtgattttggtgggtactgacagattagacgctgtaatcaagcgagatgagcaagtttataaccgctttcgtgcctgtcatcggtttggtaagttttctggtgaagattttaagcgaactgtggagatttgggaaaagcaagttttaaaactgccagttgcttctaatctttccagcaagacgatgctaaaaactttaggtgaggcaacggggggttatattggtttgctagatatgattttgagagaatcagcaattcgggcgttaaagaaaggattacagaaagttgatttggagacgctgaaggaagttacggcggagtacaagtaa

SEQ ID NO: 266 - protein, 279 aa, Artificial Sequence
  Synthetic
MTSKQAQAVAQQLGEISANGEKLQAEIQRLNRKTCILLEQVKILNDWLEGKRQARQSGRIVGESRTGKTMGCDAYRLRHKPKQEVGKPPFVPIAFLEDIPSDCSAKDLFNEILKHLKYQMNKGTVAEIRERTFRVLKGCGVEMLIIDEADRLKPKTFAEVRDIFDKLEIAVILVGTDRLDAVIKRDEQVYNRFRACHRFGKFSGEDFKRTVEIWEKQVLKLPVASNLSSKTMLKTLGEATGGYIGLLDMILRESAIRALKKGLQKVDLETLKEVTAEYK

SEQ ID NO: 267 - DNA, 507 bp, Artificial Sequence
  Synthetic
atggaagttgtagaaattcaaccttggctgtttcaaatagaacctttacagggagaaagtttgagtcactttttagggcgttttcgacgggcaaatgatttaacgcctactggattaggtaaagccacaaaacttgggggtgcgatcgcccgatgggaaaaatttcggtttaatcccccaccgtctcgccagcaattagaggcattggctaaggttgtagaggttgatgctgataggctagcgcagatgttaccgcctgctggggtggagatgaagcttgagccgattcggttatgtgctgcttgttatgttgagtcagcttatcataagattgaatggcagttgaagataacgcaagggtgcgatcgccaccaattaattttgttgtcagaatgtccaaactgtggggcaagatttaaggttccagcagtgtgggcggatggttggtgtcaacggtgttttctgagttttgccgagatggtaaagtatcaaaagtcttatcgatga

SEQ ID NO: 268 - protein, 168 aa, Artificial Sequence
  Synthetic
MEVVEIQPWLFQIEPLQGESLSHFLGRFRRANDLTPTGLGKATKLGGAIARWEKFRFNPPPSRQQLEALAKVVEVDADRLAQMLPPAGVEMKLEPIRLCAACYVESAYHKIEWQLKITQGCDRHQLILLSECPNCGARFKVPAVWADGWCQRCFLSFAEMVKYQKSYR

SEQ ID NO: 269 - DNA, 1755 bp, Artificial Sequence
  Synthetic
atgattcaagacttgcaacagcctttgatattagacgaaaacaacaatcatcttaatattcagctagatgaaaagcctgtaaaacctcaaagactaccctctgacgaattgcttactgacaaagtaaaccgcaggatagaggtgcttcaaagccttatcgagccatgcgatcgcaaaacctacggtattaaaaagcgggaggctgcgcgaaaactgggtgtatcgctgcgtcaggtagaacgcttgcttcagaagtggcgagaacatgggttagttggactaactgcaacgcgatcagataaaggaaagtaccgccttgagcaggattgggtagactttatcatcaatacttataccaacggtaacaagggcagcaagcggatgactcggcatcaagtatttatgcgggtcaaaggaagagctaagcaactcgcgctgaaaaaaggtgaatacccaagtcaccagtcggtttatcgaattctcgaccaacacatcgagcagaaagacagaaaacggaaagcaagaagcccaggctactcaggagagcggttgacacacatgactcgtgatgggcgagagttggaggtcgagggtagcaatgacgtatggcagtgcgatcatactcgcttagatatcaggcttgttgacgagtatggcgttctggatcgcccttggctaacgataatcatcgattcctattcccgttgcgtgatgggattttatttaggattcgatcaccctagctctcaaattgatgccttagctttgcgtcatgcaatcctacctaagtcttatggttctggatatcaacttcgtcacgactgggggacatatggtaaacccaatcacttttatactgacggcggtaaggactttacttcaattcacattacagagcaagttgccgttcaaataggtttcaattgctctttgagaagacgaccatcagatggtggaattgtcgagcgtttttttaggacgcttaacgaccaagtattgcgtgatttaccaggctacacggggtcaaacgtgcaacaacgcccagcaaccgtggataaagatgctcgcctgactctcaagggtttagaaacgattttagtgcgttacatagtagatgaatataaccagcacgtagatgcccgttctggaaaccagagtcggttgcagcggtgggaaggcggattaatggtagatccttatctatacgatgaattggacttggcaatttgcttgatgaagcaagagcgccggacagtccagaaatacggacgaataagatttggagatcgggattttgcagcagaacatttaagaggtcgagcaggagaattggttacagtacgattcgatcctgatgacatcactactctcttcgtctatcaacgcaatgcagatggtacggaagaattactcgattatgctcacgctctagatttagaaactgaacggctttctttacgagaactgaaagcgagaaataagaagcgtagagaaacaggtgaggaaatcaacaattcgattttagacgcgatgctagatcgtgacgaatttgtggaaaatttagttaaaagaaaccgtcagcagcgcaagcaggcagcgcaggaacaagtaaatcccacacagtctgttgctaagaaatttgctatttccaaaccagaagaaatagaggcaaagtctatgtcagaagcagaactggaagtagagctaccaagatatcaagttcgcttcatggacgacttgtttgaagatgattag

SEQ ID NO: 270 - protein, 584 aa, Artificial Sequence
  Synthetic
MIQDLQQPLILDENNNHLNIQLDEKPVKPQRLPSDELLTDKVNRRIEVLQSLIEPCDRKTYGIKKREAARKLGVSLRQVERLLQKWREHGLVGLTATRSDKGKYRLEQDWVDFIINTYTNGNKGSKRMTRHQVFMRVKGRAKQLALKKGEYPSHQSVYRILDQHIEQKDRKRKARSPGYSGERLTHMTRDGRELEVEGSNDVWQCDHTRLDIRLVDEYGVLDRPWLTIIIDSYSRCVMGFYLGFDHPSSQIDALALRHAILPKSYGSGYQLRHDWGTYGKPNHFYTDGGKDFTSIHITEQVAVQIGFNCSLRRRPSDGGIVERFFRTLNDQVLRDLPGYTGSNVQQRPATVDKDARLTLKGLETILVRYIVDEYNQHVDARSGNQSRLQRWEGGLMVDPYLYDELDLAICLMKQERRTVQKYGRIRFGDRDFAAEHLRGRAGELVTVRFDPDDITTLFVYQRNADGTEELLDYAHALDLETERLSLRELKARNKKRRETGEEINNSILDAMLDRDEFVENLVKRNRQQRKQAAQEQVNPTQSVAKKFAISKPEEIEAKSMSEAELEVELPRYQVRFMDDLFEDD

SEQ ID NO: 271 - DNA, 801 bp, Artificial Sequence
  Synthetic
atggaagatttaagtccagaaatccagaagaaaattaaagacttaagccgcccaccatacttagaattagaacgagtcaaacactgtcatgcatggttgacagagttacttatatcaaggatgactggtctattggtaggagagtctcgttgcggaaaaactgttacttgtaaagcttttacaaagcaatacaacgagttgaaaaaaacacagggacagcggtttaagccagtagttcacattcaaattcctaaagcttgtggttctagagatttctttatcaaaatcctcaaagctctaaataagcctacaaatggaaccatttcagacttacgagagcgaacgcttgatagcttggaaatacatcaagtagaaatgctaattattgacgaagccaatcacctgaaatacgaaacgttttctgatgtacgacatatttatgacgaaaatggattgggaattgccgttctcctagtcggtactaccagccgtctccatgcaatagttaagcgcgatgagcaagttctcaatcgttttctagagcaatatgaattagatcgcttagacgagtcccagtttaagcaaatcgtacagatttgggagcgagatgttctgaatttgccagtagcatccaacttagcaacaggagaaaatctaaagcttttgaagcagggaactcagaaattaattggtcgcctagatatgctccttcgcaaagcagcaattcgctcgttacttagagggcatcaaaacctagacaaagacgttttgaaagaagtaattactgcaactaagtggtga

SEQ ID NO: 272 - protein, 266 aa, Artificial Sequence
  Synthetic
MEDLSPEIQKKIKDLSRPPYLELERVKHCHAWLTELLISRMTGLLVGESRCGKTVTCKAFTKQYNELKKTQGQRFKPVVHIQIPKACGSRDFFIKILKALNKPTNGTISDLRERTLDSLEIHQVEMLIIDEANHLKYETFSDVRHIYDENGLGIAVLLVGTTSRLHAIVKRDEQVLNRFLEQYELDRLDESQFKQIVQIWERDVLNLPVASNLATGENLKLLKQGTQKLIGRLDMLLRKAAIRSLLRGHQNLDKDVLKEVITATKW

SEQ ID NO: 273 - DNA, 519 bp, Artificial Sequence
  Synthetic
atggctaaaacacttaaagaaacaaaactctggctgacacgagttgagccattagaaggggaaagtattagtcactttttgggtcgctttcgacgagcaaaaggaaataagttctcgactccgtgtggtttaggtcaagtgtcaggacttggagcagtgttggctcgttgggaaaagttttatttcaatccctttccaacatttgaggagttagaggcgctagcaaatgtggtggaagtcgatgttaatagactgcgagaaatgctgcctttagctggtgtagggatgaaacataaaccaattagattatgcggagcttgctatgcagaagaaccctatcatctgattgcatggcagttcaagactacagcaggatgcgatcgccaccagttgcgcttgctatctaaatgcccaatctgtgaaaaaccgtttcctattcccgctttatggatagaaggacgatgcctgcgttgtttgacgttttttgccgagatggtcgatcgccaaaaagcttactag

SEQ ID NO: 274 - protein, 172 aa, Artificial Sequence
  Synthetic
MAKTLKETKLWLTRVEPLEGESISHFLGRFRRAKGNKFSTPCGLGQVSGLGAVLARWEKFYFNPFPTFEELEALANVVEVDVNRLREMLPLAGVGMKHKPIRLCGACYAEEPYHLIAWQFKTTAGCDRHQLRLLSKCPICEKPFPIPALWIEGRCLRCLTFFAEMVDRQKAY

SEQ ID NO: 275 - DNA, 1692 bp, Artificial Sequence
  Synthetic
atgttaaaactatctgaagataatcacggcgacaatcaaaagccagaagtcggcgagattgtggctgaaatagcagatgataataagcaactgctggaaataattcagaagttgctggagccttgtgatcgcattacctacggacaacggcaaagggaagctgccgctcagttaggaaagtcagtgcggacagtgcgacgactagtcaaaaagtgggaagaggaaggtttggctgctttatcgcaaacgacacgagaagataaaggcaagcatcgaatcgagcaagactggcaagatttcattattaaaacttataaggagggtaataaaggtagtaagcgcattacccccaaacaagttgctgttcgcgtacaggcaaaggcagctgaactaggacaagatcgatatcccagttacagaacggtatatcgcgtcctacaaccgattattgagcggcaagagcaacaggcaagcattagaagtcggggctggcgaggttcgcgtttgtcagtcaaaactcgtgatggtaaagacttatcagtggagtacagcaatcacgtttggcagtgcgaccacactcgcgtagacgtgctgctagtagatcgaaatggtgaacttttaagtcgcccttggctgacgacagttatagacacttactctcgttgcatcatgggctttaacttaggctttgctgcaccgagttctcaggtagtggcactggcgctgcgtcatgccattttgccaaagcggtatgattcgcaataccaactccattgtgacgcgggaacctacggtaagccagaacacttttacactgacggcggcaaagattttcgctccaaccatttgcagcagattagtgtgcagttaggatttgtttgtcatttacgtgatcgccctagtgaaggtggcattgttgagcgtccatttggcactttgaacacagaattattttcaactttgccaggatacacggggtcaaacgtacaagaacgcccagagcaagctgagaaagaagcttgtttaaccttaagggagttagatcgtttgctagtgcgctacatcgtggataaatacaaccaaagtattgatgcgcgtctgggagatcaaactcgctttcagcgttgggaagctgggttaattgctgctcccaatcccattgcagagcgagatatggatatttgtctaatgaagcaaactcggcgctcaatctatcgaggtggatatctgcaatttgaaaacctgatatatcggggagaaaatatggctggttatgcaggcgaaagtgttgtgcttaggtatgaccccaaagatatcactaccgtcttaatttataggcaagaagctggtgaagaggtgtttttagctagagcatttgctcaggatttggaaacagaacaaatgtctctagatgaagcaaaagctagtagccgcaagcttcgagagacaggaaagacgattagcaatcgctcaattttggcagaagtgcgcgatcgcgaaacctttttaactcaaaagaaaactaaaaaggaacgtcaaaaagcagaacaggctgaagttcaaagggttaaacaaccattgtctatcgaccctgaagaagaaatagaagcggcatcgattccaaatcaagcagagccggagatgccagacatatttaactacgaacaaatgctcgaagattacgggttttag

SEQ ID NO: 276 - protein, 563 aa, Artificial Sequence
  Synthetic
MLKLSEDNHGDNQKPEVGEIVAEIADDNKQLLEIIQKLLEPCDRITYGQRQREAAAQLGKSVRTVRRLVKKWEEEGLAALSQTTREDKGKHRIEQDWQDFIIKTYKEGNKGSKRITPKQVAVRVQAKAAELGQDRYPSYRTVYRVLQPIIERQEQQASIRSRGWRGSRLSVKTRDGKDLSVEYSNHVWQCDHTRVDVLLVDRNGELLSRPWLTTVIDTYSRCIMGFNLGFAAPSSQVVALALRHAILPKRYDSQYQLHCDAGTYGKPEHFYTDGGKDFRSNHLQQISVQLGFVCHLRDRPSEGGIVERPFGTLNTELFSTLPGYTGSNVQERPEQAEKEACLTLRELDRLLVRYIVDKYNQSIDARLGDQTRFQRWEAGLIAAPNPIAERDMDICLMKQTRRSIYRGGYLQFENLIYRGENMAGYAGESVVLRYDPKDITTVLIYRQEAGEEVFLARAFAQDLETEQMSLDEAKASSRKLRETGKTISNRSILAEVRDRETFLTQKKTKKERQKAEQAEVQRVKQPLSIDPEEEIEAASIPNQAEPEMPDIFNYEQMLEDYGF

SEQ ID NO: 277 - DNA, 837 bp, Artificial Sequence
  Synthetic
atgagttcaaaagaagcgcaagctgttgctcaagagttgggagatattcaacccaatgatgcgagattgcaaaccgaaattcagcgattgaatcgtaaaagttttgtccctctagaacaagtaaaaattcttcatgactggttagacggaaaacgtcaagcacgacagggttgtcgagtcgtaggagagtcgcgcacaggaaaaactattgcttgtgatgcttatagattgaggcacaagccaatacaagaaccaggaaagccacctattgtacctgttgtttatatcctagtacctccagactgcggttctaaagacttatttaggttaattattgagtatctgaaatatcagatgactaagggaacagtagctgaaattcgagagcgaactcggcgggttttgaagggttgtggagtagagatgttaatcattgatgaggctgaccgtttaaagccaaatacatttaaagatgtgcgagatattggtgaagatttgggaattacagttgttttagtaggaactgaccgtttagatgcagtgattaaaccagactcccaagtttacaaccgctttcgtgcttgtcatcggtttggtaatttatcgggtgatagttttaaaagaacagtggagatttgggaaaagaaggttttgcaattgcctgttgcatcaaatctttctagtaaaacaatgttgaagacgttgggcgaagcaacgggaggttatatcggtttgctggatatgattttgagagagacagcaattcgatgtctgaagaaaggattgcccaaaatcgacttagaaacgctgaaggaagtggctggagaatataggtaa

SEQ ID NO: 278 - protein, 278 aa, Artificial Sequence
  Synthetic
MSSKEAQAVAQELGDIQPNDARLQTEIQRLNRKSFVPLEQVKILHDWLDGKRQARQGCRVVGESRTGKTIACDAYRLRHKPIQEPGKPPIVPVVYILVPPDCGSKDLFRLIIEYLKYQMTKGTVAEIRERTRRVLKGCGVEMLIIDEADRLKPNTFKDVRDIGEDLGITVVLVGTDRLDAVIKPDSQVYNRFRACHRFGNLSGDSFKRTVEIWEKKVLQLPVASNLSSKTMLKTLGEATGGYIGLLDMILRETAIRCLKKGLPKIDLETLKEVAGEYR

SEQ ID NO: 279 - DNA, 513 bp, Artificial Sequence
  Synthetic
atgaaagctacagacattcagccttggctatttcgagtagaaccctatgagggagaaagtttgagtcattttttggggaggtttcgacgagcaaatgacttaacgcctactgggttaggtaaggcagtaggagttgggggagcgatcgcacgttgggaaaagtttcgttttaatccacccccctcggaaatggagttggagaagttagcgcaggtggtaaagattgatgtgagtagattaagagagatgttaccaccaccagaaattgggatgaagatgaatccgattcgcttgtgtggggcgtgttgtggagaaatgctctgtcataagattgagtggcagttgaagacaacgaagttttgtagcaagcatgggctaactttgctgtcggaatgtcctacttgtgggtcgagatttgcgtttccggcgttgtggaatgagggatggtgtaagcggtgttttttgccgtttggggaaatggtgcagtatcaaaaattagctcaaaagtcatag

SEQ ID NO: 280 - protein, 170 aa, Artificial Sequence
  Synthetic
MKATDIQPWLFRVEPYEGESLSHFLGRFRRANDLTPTGLGKAVGVGGAIARWEKFRFNPPPSEMELEKLAQVVKIDVSRLREMLPPPEIGMKMNPIRLCGACCGEMLCHKIEWQLKTTKFCSKHGLTLLSECPTCGSRFAFPALWNEGWCKRCFLPFGEMVQYQKLAQKS

SEQ ID NO: 281 - DNA, 2046 bp, Artificial Sequence
  Synthetic
atggctgctcaaccagaggaaaataatcaagtccctgagtcgttagattcggattcgcaggaaaaaacgcaggagcaccctcctctcctgctcaacgagatttcaccagaactgcaacgaaagattgatctgattgatgcggtaatgcaggcttccaataagaaggctcgccaggaagcgatcgccagggcagcccaggagctagggctaacagagcgcacaattcggggtctagttcggcgtgtcgaaagcggtgaaggacccgccgtgcttgcagtgggtcgtcaagacaaagggcagtttcgcattgcagaacattggttcaagtttattattgccacctacgaatggggacagaagcaaggttcccgaatgaataagcatcaggttcacaggaagctgggaacattagcaaagttaggtgagaagctgcgagacaagaggtatagaaagctattcatgggtcatcgcaaggcacgtgaagacttagttgcaggcgaatacccatcccatgtcactgtctataaagtcattgatttctacctgaagggaaagcacaagaaggtccgtcaccctggctctccggcagaaggacaaatcattcaaacgaccgaaggaattttggagattacgcacagtaatcagatttggcagtgcgatcacaccaagttagatattctggtagtcgatgagaagggtgacacgatattagaaattgacgacgacggcgaagaggtctggggacgcccttacttgactctgattgcagacagctactccgggtgtgtcgtcggctttcatcttgggctagaacccgcaggctcccatgaagtgggtcttgcgctacgccacgcaatgctgcccaaacagtatggaccggagtacgaacttgaggagaaggagattgtttttgggaaaccagagtactggctaaccgatcgcgcaaaggagttcaaatccaaccatcttcaacaaatctcaatgcaggtcggtttcaaacggcggctacgagcgtttcctcaggcaggtggcttgatcgagacgatctttgacaccctgaataaggaattgttatcgctgttgccaggctacaccgggtctaatgttcaagatcgtcctaaagatgcagaaaaatatgcctgcatcacgcttaaagagcttgagaagcttttagtacggtactttttcaatacttacaactggctggactaccccagagtcgagggtcaaaagcgacatgaacgttggcgttccatgttgctgtcagaaccagaagttttagacgagcggagtctggacgtttgcttgatgaaagtttctcaccgtaaggtcgaaaagtacggcagcgttgagtttgcccgtctgatctatcagggtgactgtttaattccctatcagggtgaggaaatctctctgcgatatgacgagcggaacatcaccgcgctcctagcttacacccgccccgcaggaggacagcccggtcagtacattggcgttgttcgtgcgcgtgatttgaagcaagaccaaatttcgctggaggaactgcgctggtacaaacggaaactgcgtaagcgcggtgtgaaggttgatcatgattcgatcgtcgccgaacgtatgggactgtatgaatttattgatgagaagcggaagtccaagcgacagcgccgcaagcaggcaaaccaggagcatcagcagcaaacgaacgcctccacagtggttgagcttttccctcagaaccagtcggttgagacgcctccagattctcaacccgacgccgaagcctttgtcagcgagtcccaaactgaggacaggacgaaccctcctccaccatcgcagtcagttcctgagccattgcccccggttgacgctccagacagtacagttgcggacctggtgggggctgaagatgcctccgtggtgattgtggacgaggtgtcaacgcctgacgaatcctctgatgactcctctttgtctaatactgtagacttttctcatgagccagtcgttgcttacgattgggaccaacttctagcagataactggtaa

SEQ ID NO: 282 - protein, 681 aa, Artificial Sequence
  Synthetic
MAAQPEENNQVPESLDSDSQEKTQEHPPLLLNEISPELQRKIDLIDAVMQASNKKARQEAIARAAQELGLTERTIRGLVRRVESGEGPAVLAVGRQDKGQFRIAEHWFKFIIATYEWGQKQGSRMNKHQVHRKLGTLAKLGEKLRDKRYRKLFMGHRKAREDLVAGEYPSHVTVYKVIDFYLKGKHKKVRHPGSPAEGQIIQTTEGILEITHSNQIWQCDHTKLDILVVDEKGDTILEIDDDGEEVWGRPYLTLIADSYSGCVVGFHLGLEPAGSHEVGLALRHAMLPKQYGPEYELEEKEIVFGKPEYWLTDRAKEFKSNHLQQISMQVGFKRRLRAFPQAGGLIETIFDTLNKELLSLLPGYTGSNVQDRPKDAEKYACITLKELEKLLVRYFFNTYNWLDYPRVEGQKRHERWRSMLLSEPEVLDERSLDVCLMKVSHRKVEKYGSVEFARLIYQGDCLIPYQGEEISLRYDERNITALLAYTRPAGGQPGQYIGVVRARDLKQDQISLEELRWYKRKLRKRGVKVDHDSIVAERMGLYEFIDEKRKSKRQRRKQANQEHQQQTNASTVVELFPQNQSVETPPDSQPDAEAFVSESQTEDRTNPPPPSQSVPEPLPPVDAPDSTVADLVGAEDASVVIVDEVSTPDESSDDSSLSNTVDFSHEPVVAYDWDQLLADNW

SEQ ID NO: 283 - DNA, 936 bp, Artificial Sequence
  Synthetic
atggctcaacctgctccacaacccaacgcacaatcgcaaccagtccccagccagtccgccactaagccagcgccacaacaatctgtcctggcattgcccaagcgatcgccagaaaaccaggctgaagttgagcgaattcgggacagcgagacttacaaagaggtttctcgtgatcaacttttgtttaagtggttgtcgtcacagcaggaatcgcgtgccagtggctttgtgtacggagtcaattttggagatctgaggaaatcctgccaattttatcaactgctatacgtgcggaaacggggaaacctgtttctcactcccacaccagttctctatgctgaggttgaacagtttggttccccgactgacctttttattggaatcactcaggcaggaggcaatcccttctcaggtatgggatcgttacgagatttgaggaaacaggcggtcggcacacttaaaaaacttcaaaccagcacactgattattggctatgcagaagttttgtcccctgaggcgctcaaagaacttgtaaaaatgaggcgagatctaaaaatctctattattcttgcgggttctatgtgcttatctgagttctttgacaagctcgataagcagcgtggtccaaaacacaaggacattagaaacgcttttctggagtcccaccaatacccctgcttcgagaagaatgagacagaagccattctcgaaggctgggagaatcaagtcttaagctcctggtctaaaaagcttgatctgaagaagattcctggtgttcctaacttcctctacactcgctgtggcggacaggctgaaccgctgtacgagatgctccgcaagatagcgatccaaacgttggacgatccaaagctgcaaattagtacaaccactctcacagagctatttgcagcaaggcgggtagcggtaagcacgtag

SEQ ID NO: 284 - protein, 311 aa, Artificial Sequence
  Synthetic
MAQPAPQPNAQSQPVPSQSATKPAPQQSVLALPKRSPENQAEVERIRDSETYKEVSRDQLLFKWLSSQQESRASGFVYGVNFGDLRKSCQFYQLLYVRKRGNLFLTPTPVLYAEVEQFGSPTDLFIGITQAGGNPFSGMGSLRDLRKQAVGTLKKLQTSTLIIGYAEVLSPEALKELVKMRRDLKISIILAGSMCLSEFFDKLDKQRGPKHKDIRNAFLESHQYPCFEKNETEAILEGWENQVLSSWSKKLDLKKIPGVPNFLYTRCGGQAEPLYEMLRKIAIQTLDDPKLQISTTTLTELFAARRVAVST

SEQ ID NO: 285 - DNA, 561 bp, Artificial Sequence
  Synthetic
atggttgatgagacagacgaagaatttgaactaccacgctggtgtccagaaccttttgaaggcgagagtatcggcagttatctggtgcggtttcgatcgcaagaaattagctccatgtctactatcggtagtttgagtagagcactaaagctgggcacaacgttaggaagatgggaaaagcttcgcttcaatccttctcccagcatggaggaaatagagatcttctgtaactacatagggctggcggtagaaaaactcattccaacctttccggcaaaagggcgaaggacgacgccggaaccgattcgattctgtgcttcctgctacgcagaagccacctatcacagactggagtggcaggataaagcgatcgccaattgtcccaagcatcaagaacctttgctccatcaatgtccaggttgtgaaagaccgttctcgattcctgagctactccagggtgaccaatgtaagtgtggcttgtacttcagacgaatggctgaacaccgagagcggttccaaaggagaaagcttgctaagaggctcaacaggcaaactcattaa

SEQ ID NO: 286 - protein, 186 aa, Artificial Sequence
  Synthetic
MVDETDEEFELPRWCPEPFEGESIGSYLVRFRSQEISSMSTIGSLSRALKLGTTLGRWEKLRFNPSPSMEEIEIFCNYIGLAVEKLIPTFPAKGRRTTPEPIRFCASCYAEATYHRLEWQDKAIANCPKHQEPLLHQCPGCERPFSIPELLQGDQCKCGLYFRRMAEHRERFQRRKLAKRLNRQTH

SEQ ID NO: 287 - DNA, 2046 bp, Artificial Sequence
  Synthetic
atgatgtctaccgaagacgatcgcgaacagtcagaagtcgttgatgagccttcagaaacactagcacttgatgccagcaactttgttgcggattgtaaacaaaccctgcttgagaatctagataaacatacatcaaggtttgctttagctcagtgggtagctaattctcccaatcgcgatatttttcttcaaaggaagcaagagatcgccgacacattggagctttccatgcggcaggtggaacgaattttaaagagttatcacaaaagtgaattaaaggaaacctctggaactgagagatcagataagggtgagtacaaaatcttgccttactgggttgactacattagatggttctacgatgacaggattgagaaaaggttgtctatatctcgtgctgatgttgtcagagaagtagaacgacacgcagaaattgacctacaacttcagccaggtgaatacccgcatcgtgcttcggtttatcgtgttttagcccctgttgtagcacgtgcggctttacaaaagaaaattaggaaccccggttcaggttcatggttttatctaaaaacccgtgatggcgaattcatcaaaattttctgtagcaaccaggttattcagtgtgatcacacaaaactagatatccttattgttgacaaagatggcaaagtcttgggtcgtccttggctgacaattgtagtggatagcttctctagctgcgttttagggtttttccttggactcaaacaacccggcaccgaagaggtagcgcttgctctacgtcatgcagctttacctaaacattaccccgacgactatgaactgctaagaccttgggatgtcaatgggctaccgctccagtactttttcacagatggtggaaaagacttgtcgaaagcaaagcacattcaacagatcggcaggaatttcaactttaagtgcgagttacgctttaaccctcctcaaggtggcattgtagaacgcgtttttaagaccattaatagtaaagtgcttcaggggcttccaggctacacgggttcctgtgttgaagatcgcccaaaacacgccgaagaaaccgcctgtctaacctggagggatgttaagaaaatcttgaccgggttcttctgcgatagctataaccacgacaaacatcctaagaaaaagggtatgacaaggtatgaatactggttagagggattggggggaaccttaccagaacctattgatgagcaagaattagatctttgcttgatgaaagcagcataccgctctgttcaagcccacggttcagtaaattttgaaaatgttacctacaggagcgaagagcttaaaaatcacttgggggagcgagtaacgctgagatatgatcccgaccatattctaagccttcgagcttatacctatgaagcggatgaaaaaatgggagagttaattgacgataatgtgaaagctctcaatctagaatatcaggctctgactttggatgaattgaagcaaattaatgcaaagttgactgaggaaggtaaagaaatcgataactatacgattcttcaggaactggggcgtagaaccgaaatggttgatgaggcaattcagaaccgaaacgatcgcagaagagcagcacacaaagaggctcgaagtgagcataaagataactcaaccaaacctggcagtcgtaagacaactaagaaagcttcagtcaccctccgtggaagcgtacctcccagcttggctgaagcagaattaacagccccaagtgcacctgaagccgaagagagtgacatttccgctagcacgctagagcttttacagcttcctgataagcctgacgggacggttttctatcctctttccgacgatggcagtgccgaaatcgttcagacagaaatcgctcaagcgtcagttgtcgagcagagtttggcagcgatcgtgactcctctagctgaaaaagctactacggaagcagtcattacgcctcaagtcgaatccccaaaacagaaggagtgctacgatttcattatttcaaaacgttcgcgccgaagtcgatag

SEQ ID NO: 288 - protein, 681 aa, Artificial Sequence
  Synthetic
MMSTEDDREQSEVVDEPSETLALDASNFVADCKQTLLENLDKHTSRFALAQWVANSPNRDIFLQRKQEIADTLELSMRQVERILKSYHKSELKETSGTERSDKGEYKILPYWVDYIRWFYDDRIEKRLSISRADVVREVERHAEIDLQLQPGEYPHRASVYRVLAPVVARAALQKKIRNPGSGSWFYLKTRDGEFIKIFCSNQVIQCDHTKLDILIVDKDGKVLGRPWLTIVVDSFSSCVLGFFLGLKQPGTEEVALALRHAALPKHYPDDYELLRPWDVNGLPLQYFFTDGGKDLSKAKHIQQIGRNFNFKCELRFNPPQGGIVERVFKTINSKVLQGLPGYTGSCVEDRPKHAEETACLTWRDVKKILTGFFCDSYNHDKHPKKKGMTRYEYWLEGLGGTLPEPIDEQELDLCLMKAAYRSVQAHGSVNFENVTYRSEELKNHLGERVTLRYDPDHILSLRAYTYEADEKMGELIDDNVKALNLEYQALTLDELKQINAKLTEEGKEIDNYTILQELGRRTEMVDEAIQNRNDRRRAAHKEARSEHKDNSTKPGSRKTTKKASVTLRGSVPPSLAEAELTAPSAPEAEESDISASTLELLQLPDKPDGTVFYPLSDDGSAEIVQTEIAQASVVEQSLAAIVTPLAEKATTEAVITPQVESPKQKECYDFIISKRSRRSR

SEQ ID NO: 289 - DNA, 885 bp, Artificial Sequence
  Synthetic
atgttagagtccaacttggtttcacagcctatcgtagagatcttagcttcgttggcagacacgagagttaaggtgtccgccttggaaagactactcaacaatggctatataccaacagatgctgctgagtctgcgatcaattggatggacgagcggcggtttttgaaacaatgcggtcggcttgttgctccacgtggaagtggtaaaagtcggctgtgtgaggaatatgaagatcgagattttgaccgcgttattcgggtaaaggctcctacgggatgttcttctaagcaagttcatagattaatccttaaagcaatgaaccatgcggcaaagatcaggcggcgtgatgatccaagagcaatggtagtcgagagtgtgatgccgttcgaaattgaggtaatccttattgataacgcgcaaaatttggcagtagaagcattctctgatcttaaagatctttacgatgagaaaaaggtaactatcattttctccggcacacctgatttagatgtttcgctggagcaagttgggctgttggaaagtttcccttactcttatcctctaggttctttgtccgaagctgattttaagaaagttttggacacgatcgaagcaaaagcactgaatcttccctttgaatcgaagttaagtgagggagagaaatttgagctcttaacgacatgcacaggtagtttgattggaaggctgatgaagcttctaccgacagcaattttatattctgttcaaaaagtttcagagcaggaggcggatcaaactgagtcacagcctatgtataagctggatagcatatctcttgaagcgcttagaaagattgcagtagggtacggggtaaaagttccgtttggaaaatctagttcaaagtaa

SEQ ID NO: 290 - protein, 294 aa, Artificial Sequence
  Synthetic
MLESNLVSQPIVEILASLADTRVKVSALERLLNNGYIPTDAAESAINWMDERRFLKQCGRLVAPRGSGKSRLCEEYEDRDFDRVIRVKAPTGCSSKQVHRLILKAMNHAAKIRRRDDPRAMVVESVMPFEIEVILIDNAQNLAVEAFSDLKDLYDEKKVTIIFSGTPDLDVSLEQVGLLESFPYSYPLGSLSEADFKKVLDTIEAKALNLPFESKLSEGEKFELLTTCTGSLIGRLMKLLPTAILYSVQKVSEQEADQTESQPMYKLDSISLEALRKIAVGYGVKVPFGKSSSK

SEQ ID NO: 291 - DNA, 534 bp, Artificial Sequence
  Synthetic
atgaccagcaagcttagtaaataccccagattgccaccccttgagccttactcaggcgaaagcctaccacattatcttggtagatttcgacgcctaaaaagcaccggagcaccctctccaagtgcgttgggacaaatggtggggattggtgcggttgtggctcaatgggaacaggggtatttcaacccttttccaacagttgagcagctttctactttagggacagtcatcggtttagacatggatacattaacccggatgctgcaaccaaaaggggtaacgttagattcaagaccaattcgtttatgtggagcttgttacgccgagcacccttgtcaccggattaagtggcagttcaaatccaaattgagtccaaggtgcgatcaccacaagctcaaactattaatgaaatgcccaggctgtgagcagccatttccagttccttcgctttggctagaaggaaaatgccaaaacgcaaaatgcggcatgcgatactcaagaatggcgaagcatcagaagtccgtgctttattaa

SEQ ID NO: 292 - protein, 177 aa, Artificial Sequence
  Synthetic
MTSKLSKYPRLPPLEPYSGESLPHYLGRFRRLKSTGAPSPSALGQMVGIGAVVAQWEQGYFNPFPTVEQLSTLGTVIGLDMDTLTRMLQPKGVTLDSRPIRLCGACYAEHPCHRIKWQFKSKLSPRCDHHKLKLLMKCPGCEQPFPVPSLWLEGKCQNAKCGMRYSRMAKHQKSVLY

SEQ ID NO: 293 - protein, 360 aa, Artificial Sequence
  Synthetic
MYPYDVPDYAPKKKRKVGGSGGGGSGGGGSGGTIYSEHWSLNPLEIPQRSRLFSLEPVAVGTPYAESLSSYLHRLAQAHCLTSEKLVMGEIAPLILKDEDKSELLSKNLSHLLGNSDAKPAINGMREMTEKLVTVLEELTMRQDLRFLTLLSWKGMIYDKGLFRNYRAWCPCCCEEWMQKNKTIYEPLSWSFKDVEFCLIHKQRLIEECSHCGARLPVMARLSPAGFCSRCYGWLGQEIKGEEEIEKYRVNIQGISELIALTPQLGYKPIPIELTRKLQLILLVFEQAIGKDVKLLGDLGGIMESLRIASTTNQSQPYHLVKLIIPVCEKAKISVFQLFGSDFKELGKILFGNFSLELKL

SEQ ID NO: 294 - protein, 493 aa, Artificial Sequence
  Synthetic
MYPYDVPDYAPKKKRKVGGSGGGGSGGGGSGGLASVLETYESWNLKKPLIPQRSRLYQPQPVGIGTPYIESLTGYITRIAELHGVLPGVLMTREIAPLVNKIYFQNGANRGFREIFNRSQALNGMGEMAADLVQVLQKLTLRDDLRFLTMLFWSNILTPRNLFRTRKAWCPICYQERHQNGLVVYEQLLWTINLITICPQHQKPLVELCPHCNHESPLLNWRSRPGYCSKCGEWLGANQCLKTFTDGEGSIKLQLEWQYWTANVVGELILASQCFESAPSKENITKSLNIVIDKVAENNAAAFSRLIGVPKNSLWMWQSTKTLPELNTLLKICYELEISLVEFLTPKNLITKSFTKISQKHLQLSRTPRVSPKSFDQYQVKDALLAILAGNEEPPPTMEEVGKRLGHHNRTISRHFPDLCSAISAKCRNYNKACRLKSIEKLCSEVREIVLSLNAQGVYPTEGRVCELMPNPGCFRYKQVRAAFNDARREFGL

SEQ ID NO: 295 - protein, 929 aa, Artificial Sequence
  Synthetic
MYPYDVPDYAPKKKRKVGGSGGGGSGGGGSGGKEQFEQWVARLQISEAGQKIIEKVRSSEPSRRVGGGSKNVSGRYPSRKMGVTIQFESHRVELPIIYQLEHDKDVLEFYDQPPQIKLDYQASNGRRLGVLHTPDLFVIRTNSAGWEECKTEQDLKKLAEKNPNRYFYSEENNQWHSLPGEVYANQFGLYHRIHSDREINWVLQRNLQFLEDYYRSESLVVEEAIAQSLLAIVSSQPGITLAELLNRSTGAKSDDIYTLIIQEQIYIDLNATPLAEPERCLIFRDEQTASAYRLMVEQPSVSLPAISPVVNIVTGATVSWDGKGLNIIHVGETEVILGAENNQLIELKKAIFENLVRQGKITSLQTPEKTAISTESWQRFHQASPEDQAEALERYKTIEPYLNGHPPENETIPARTIRHWKAKYLIAIQKYGCGYIGLLSHRSVKGNRQRKLPEDTLAIMEKFILEDYETLKQKRMWEVHAALVRACEEAGVIAPSYKAFTKEVQRRTGYEQTKKRQGRRAAYQHESFYWELAITTPRHGDRPFEIGHIDHTELDVELVCSDTGRNLGRPWATFLVDAYSRRLLAVYLTFDSPSYRSCLMVLRICVKRHGRLPQIVVVDNGAEFHSVYFETLLATFECTKKQRPPAKARFGSVCERLFGTSNTQFVHNLLGNTQITRNVRQVTKSVNPKNLAVWTLGLLYEYLCAWAYEVYDTDEHPALFQSPRDAFAAGMAIGGSRVHRMIPYDENFQILTLPTTSEGKAKVQVGRGIKINYIYYWSNSFRDPQIENTSVQIRYDPFNIGIAYAFVRGQWVQCISQYYAELQGRSEKELKLASIELRKHYSNHTQQSKVSAKNLAEFLASVEAQEALLEQRSYDAEVKEVFRVIEGGKATTSRNEEPKLIQVTFANTDFQADEDEAIVPETLVVYEEF

SEQ ID NO: 296 - protein, 414 aa, Artificial Sequence
  Synthetic
MYPYDVPDYAPKKKRKVGGSGGGGSGGGGSGGTKSTGFPLELLTRPATERLAYFENYTVAHPRLKEVYEILMRTIAEPAGASFIFVYGASGVGKTTLRLRVEQKLTELALPKLESDRARVPVVGIEAIAPESRYFNWKEYYTRALITLEEPLIDHKFDYGVRGISRDNFGKINVESKVVAPALRRALENALIHRHPDVFFVDEAQHFGKVASGYKLQDQLDCLKSLANMTGILHCLLGTYELLTFRNLSGQLSRRSVDIHFRRYCADSPEDVQAFKSVLLTFQQHLPLAETPNLVDHWEYFYERTLGCIGTLKDWLKRVLSDALDREATTITLKDLQKRALSVAQCQKMFKEIQEGERQLSETEADVQNLRSALGLGAKPIVLPEETPKTTRPPGKVGKRKPKRDPIGVQQDVS

SEQ ID NO: 297 - protein, 360 aa, Artificial Sequence
  Synthetic
MTIYSEHWSLNPLEIPQRSRLFSLEPVAVGTPYAESLSSYLHRLAQAHCLTSEKLVMGEIAPLILKDEDKSELLSKNLSHLLGNSDAKPAINGMREMTEKLVTVLEELTMRQDLRFLTLLSWKGMIYDKGLFRNYRAWCPCCCEEWMQKNKTIYEPLSWSFKDVEFCLIHKQRLIEECSHCGARLPVMARLSPAGFCSRCYGWLGQEIKGEEEIEKYRVNIQGISELIALTPQLGYKPIPIELTRKLQLILLVFEQAIGKDVKLLGDLGGIMESLRIASTTNQSQPYHLVKLIIPVCEKAKISVFQLFGSDFKELGKILFGNFSLELKLGGSGGGGSGGGGSGGPKKKRKVYPYDVPDYA

SEQ ID NO: 298 - protein, 493 aa, Artificial Sequence
  Synthetic
MLASVLETYESWNLKKPLIPQRSRLYQPQPVGIGTPYIESLTGYITRIAELHGVLPGVLMTREIAPLVNKIYFQNGANRGFREIFNRSQALNGMGEMAADLVQVLQKLTLRDDLRFLTMLFWSNILTPRNLFRTRKAWCPICYQERHQNGLVVYEQLLWTINLITICPQHQKPLVELCPHCNHESPLLNWRSRPGYCSKCGEWLGANQCLKTFTDGEGSIKLQLEWQYWTANVVGELILASQCFESAPSKENITKSLNIVIDKVAENNAAAFSRLIGVPKNSLWMWQSTKTLPELNTLLKICYELEISLVEFLTPKNLITKSFTKISQKHLQLSRTPRVSPKSFDQYQVKDALLAILAGNEEPPPTMEEVGKRLGHHNRTISRHFPDLCSAISAKCRNYNKACRLKSIEKLCSEVREIVLSLNAQGVYPTEGRVCELMPNPGCFRYKQVRAAFNDARREFGLGGSGGGGSGGGGSGGPKKKRKVYPYDVPDYA

SEQ ID NO: 299 - protein, 929 aa, Artificial Sequence
  Synthetic
MKEQFEQWVARLQISEAGQKIIEKVRSSEPSRRVGGGSKNVSGRYPSRKMGVTIQFESHRVELPIIYQLEHDKDVLEFYDQPPQIKLDYQASNGRRLGVLHTPDLFVIRTNSAGWEECKTEQDLKKLAEKNPNRYFYSEENNQWHSLPGEVYANQFGLYHRIHSDREINWVLQRNLQFLEDYYRSESLVVEEAIAQSLLAIVSSQPGITLAELLNRSTGAKSDDIYTLIIQEQIYIDLNATPLAEPERCLIFRDEQTASAYRLMVEQPSVSLPAISPVVNIVTGATVSWDGKGLNIIHVGETEVILGAENNQLIELKKAIFENLVRQGKITSLQTPEKTAISTESWQRFHQASPEDQAEALERYKTIEPYLNGHPPENETIPARTIRHWKAKYLIAIQKYGCGYIGLLSHRSVKGNRQRKLPEDTLAIMEKFILEDYETLKQKRMWEVHAALVRACEEAGVIAPSYKAFTKEVQRRTGYEQTKKRQGRRAAYQHESFYWELAITTPRHGDRPFEIGHIDHTELDVELVCSDTGRNLGRPWATFLVDAYSRRLLAVYLTFDSPSYRSCLMVLRICVKRHGRLPQIVVVDNGAEFHSVYFETLLATFECTKKQRPPAKARFGSVCERLFGTSNTQFVHNLLGNTQITRNVRQVTKSVNPKNLAVWTLGLLYEYLCAWAYEVYDTDEHPALFQSPRDAFAAGMAIGGSRVHRMIPYDENFQILTLPTTSEGKAKVQVGRGIKINYIYYWSNSFRDPQIENTSVQIRYDPFNIGIAYAFVRGQWVQCISQYYAELQGRSEKELKLASIELRKHYSNHTQQSKVSAKNLAEFLASVEAQEALLEQRSYDAEVKEVFRVIEGGKATTSRNEEPKLIQVTFANTDFQADEDEAIVPETLVVYEEFGGSGGGGSGGGGSGGPKKKRKVYPYDVPDYA

SEQ ID NO: 300 - protein, 414 aa, Artificial Sequence
  Synthetic
MTKSTGFPLELLTRPATERLAYFENYTVAHPRLKEVYEILMRTIAEPAGASFIFVYGASGVGKTTLRLRVEQKLTELALPKLESDRARVPVVGIEAIAPESRYFNWKEYYTRALITLEEPLIDHKFDYGVRGISRDNFGKINVESKVVAPALRRALENALIHRHPDVFFVDEAQHFGKVASGYKLQDQLDCLKSLANMTGILHCLLGTYELLTFRNLSGQLSRRSVDIHFRRYCADSPEDVQAFKSVLLTFQQHLPLAETPNLVDHWEYFYERTLGCIGTLKDWLKRVLSDALDREATTITLKDLQKRALSVAQCQKMFKEIQEGERQLSETEADVQNLRSALGLGAKPIVLPEETPKTTRPPGKVGKRKPKRDPIGVQQDVSGGSGGGGSGGGGSGGPKKKRKVYPYDVPDYA

SEQ ID NO: 301 - DNA, 636 bp, Artificial Sequence
  Synthetic
atgtacatccggaacctgcggaagccctctccaaacaagaacgtgttcaagttcgccagcaccaaggtgtccaacgtgatcatgtgcgagagcaccctggaattcgacgcctgcttccacaacgagtacaacgacgagatcgagagctacggctctcagcccgagggctttcagtacgagttcaacggcaagctgctgccctacacacccgacgctctgatcctgtacaagaacggcgtggaaaagtaccacgagtataagccctacagcaagatcagcagccctctgttcagagagcagtttatcgccaagagagccgccagcctggaactgggcagagagctgatcctggtcaccgacagacagatcagagtgaaccccatcctgaacaacctgaaactgctgcaccggtacagcggcgtgtacggcgttagcgacatccagagaaagctgctcgagtacatccagcagtctggcgccgtgaagctgaacgacatcagccacagattcaacctgagcgtgggcgagacaagaagcttcctgtacgccctgatccacaagggcttcgtgaaggccgacctggaaagagagagcctgagcgacaaccctctcgtgtggtccatctgcaacggctga

SEQ ID NO: 302 - DNA, 1842 bp, Artificial Sequence
  Synthetic
atggccgacttcaacgacgagttcgatgagttcgacgtgcccgtgaagcctgagatccccatccagtacgtgaagctggaagatgccaagaccatcaagcgcgacctggatacctttcctgacttcctgaaagagaaggccctggacaagtacaagctgctgtgcatcatcgagaaagaggaccccggcagctggacccagaagaatctggaccccatcctggataagctgttcgccgagagcgagctgaacagacccaattggagaaccgtggccagatggcggaagcggtacatcgacagcaatggcgatctgaccagcctggtgtccgccagacacaagatgggcaacagaagcaagcggatcgagggcgacgagaagttcttcgacgaggccctgaagtactttctggacgccaagcggctgtctatcgccacagcctaccggtactacaaggacctgatcatcattgagaacgagaagatcgtggacggcaagatccctatcatcagctacaccagcttcaacaagcgcatcaagaccacctctccatacgacgtgacagtggccagacggggcaagttcaaggccgaggaactgtatggcgcctgcgccgctcatatcctgcctaccagaatcctggaacgcgtggaaatcgatcacacccctctggacatcatcctgctggacgatgagctgggcatccccatcggcagacctaatctgacagccctgatcgacgtgttcagcggctgcctgctgggctttcacctgagctataacgcccctagctatgtgtctgccgccaaggccattagccacgccgtgaaacctaagctgctgagcagcctgaacatcaccctgcagaacgactggccctgctatggcaagatcgagaacctggtggtggacaacggcgccgagttttggagtgatgccctggaacacgcctgcaaagagacaggcatcaacacccagtacaacaaagtgggcaagccccagcacaagcccaccatcgagagattcttcggcctgatcaaccagtacttcctggatgagttccccggcaagaccttcagcaacatcctggccaaagagaagtacaaccccgagaagaacgccgtgatccggttcagcaccttcgtgaaagaattccacagatgggtcgtcgacgtgtaccaccaggacagcgacagcagaaagacacggatcccaatccagcagtggaagaagggcttcgacgcctatcctccactgaagatgagcgacgaggaaagcaagctgttctctatcctgctgaacgtgctgaagaagcccacactgacccggaacggcatcaagttcgagaatctgatgtacgacagcacagccctgtccgagtaccggaagcagtaccctcagacaaagggcaccgccaagaagatcatcaagatcgaccccgacgacctgagcaagatctacatccacctggaagaactggaaacctacctggaagtgccctgcaccgataccaccggctacaccaagaacctgagcctgtacgagcacaagaagatttccaagatcaagcggaagatgatcgatgagtacatcgataacagcgccctggccaaggctcggatggccaagagagagagcatcaagaaagagcaagagctgagcctgaccaacaagagcaaggccaagatcagcagcgtgaagaagcaggcccagctggccggcatctctaataccggacctggcaccattctggtcaaagaggacagcagcagcatccccaagagcaacgacaccaacaacatgttcgacgactgggacaacgacctggaagccttcgagtga

SEQ ID NO: 303 - DNA, 1002 bp, Artificial Sequence
  Synthetic
atgaacgtgctgaccgaggtgcagatcgagcagctgagaaacttcagcgactgcatcgtgatgcaccctcagatcaagaccatcttcaacgacttcgacgagctgcggctgaaccggaagttccagagcgatcagcagtgtatgctgctgattggcgataccggcgtgggcaagagccacaccatcaaccactacaagaaacgcgtgatcgccacacagaactacagccggaacaccatgcctgtgctgatctccagaatcagcagaggcaaaggcctggacgccacactggttcagatgctggctgacctggaactgttcggcagcagccagattaagaagcggggctacaagaccgacctgaccaagaaactggtggaaagcctgatcaaggcccaggtggaactgctgattatcaacgagttccaagagctgatcgagttcaagtccgtgcaagagcggcagcagatcgccaacggcctgaagttcatcagcgaagaggccaaggtgcccatcgtgctcgttggaatgccttgggccgccaagattgccgaggaacctcagtgggcctctagactcgtgcggaagcggaagctggaatactttagcctgaagaacgacagcaagtacttccggcagtacctgatgggcctcgccaagcagatgagcttcgatgcccctcctaagctggaaagccggcacacaacaatcgccctgttcgccgcttgcagaggcgagaatagagccctgaaacatctgctgtctgaggccctgaagctggccctgagctgtaacgagcacctggaaaacaagcacttcttcaccgcctacggcaagttcgacttcttcaatgacaaagagaagctgaagctcaagaaccccttcaagcaggacatcaaggacatcgagatctacgaagtgatcaagagcagcagctacaaccccaacgctctggaccccgaggatatgctgctcggcagacagttcagctccatcaagtga

SEQ ID NO: 304 - DNA, 1227 bp, Artificial Sequence
  Synthetic
atggccttcctgttcagccctaaggccagagcctttagcgacgagagcctggaaagctacctgctgagagtggtgtccgagaacttcttcgacagctacgagggcctgagcctggccatcagagaggaactgcacgagctggattttgaggcccacggcgcctttccagtggacctgaagagactgaacgtgtaccacgccaagcacaacagccacttccggatgagagccctgggcctgctggaaacactgctggacctgcctagatacgagctgcagaagctggccctgttcaagagcgacatcaagttcaacagcagcacagccctgtacaagaacggcgtggacatccctcacaagttcatccggtatcaccccgaggacgccgtggatagcattcctgtgtgtcctcagtgcctggccgaggaagcctacatcaagcagagctggcacatcaaatgggtcaacgcctgcacaaagcacaagtgcgccctgctgcacaactgccctgaatgctgcgcccagatcaactacatcgagaacgagagcatcacccactgcagctgcggcctggaactgacctgtgcctctacaagccccgtgaacaccctgagcatcgagcacctgaacaagctgctggacaagagcgagggcaacgacagcaacctgctgttcaacaacaccacactgaccgagagattcgccgctctgctgtggtatcaagagcggtacagccagaccgacaacttctgcctggatgtggccgtggactacttcagcaaatggcctgccgtgttctacaaagagctggacgagctgtctaagtacgccgagatgaagctgatcgacctcttcaacaagaccgagttcaagtttatcttcggcgacgccatcctggcctgtcctagcacacagaagcagagagagctgcacttcatctacagagccctgctggactacctggtcaccctggtggaaagcaaccccaagaccaagaagcccaacgccgccgatctgctggtgtctgttctggaagctgccactctgctgggcacctctgtggaacaggtgtacagactgtaccaggacggcatcctgcagaccgtgtccagacacaagatgaaccagcggatcaacccctacaagggcgtgttcttcctgcggcacgtgatcgagtacaagaccagcttcggcaacgataaggcccggatgtacctgtctgcttgg

SEQ ID NO: 305 - DNA, 630 bp, Artificial Sequence
  Synthetic
atgtacatccggaacctgcggaagccctctccaaacaagaacgtgttcaagttcgccagcaccaaggtgtccagcgtggtcatgtgtgaaagcagcctggaattcgacgcctgcttccaccacgagtacaacgacctgatcgagagcttcggctctcagcccgagggcttcaagtacaagttcatgggcaagagcctgccttacacacccgacgctctgatcagctacaccgacaagacccagaagtatcacgagtataagccctacagcaagatcgcctctcctctgttccgggccgagtttgccgctaaaagagccgcctctctgaagctgggcatcgacctggtgctggtcaccgacagacagatcagagtgaaccccatcctgaacaacctgaagctgctgcacagatacagcggcgtgtacggcatcagcggcatccagaatgagctgctgagcttcatccacaagagcggcgtgatcaagctgaacgacatcagcagccaagtgggcatccccatcggcgagacaagaagcttcctgttcggcctgatgcacaagggcctcgtgaaagccgatctgggctgcgacgacctgaccaacaatcccacactgtgggccacaccttga

SEQ ID NO: 306 - DNA, 1854 bp, Artificial Sequence
  Synthetic
atgggctacaccatgaccgatttcttcaacgagttcgacgagagcctggtgcctctgaagccccagacacctacacagtacgtgaagctggacgacgccaacctgatccagagagatctggacaccttctccgacaccttcaagaatcaggccctgcagcggtacaagctgatctccaccatcgacaagaagctgagcagaggctggacccagaggaatctggaccccatcctggacgagctgttcaaaggcggagatgtcgtgcggcccaattggagaacagtggccagatggcggaagaagtacatcgagagcaacggcgacattgccagcctggccgacaagaaccacaagatgggcaaccgcaccaaccggatcaagggcgacgacaagttcttcgacaaggccctggaacggttcctggacgccaagaggcctacaatcgccaccgcctaccagtactacaaggacctgatcgtgatcgagaacgagagcatcgtggaaggcaagatccccatcatcagctacaacgccttcaacaagcgcatcaaggccattcctccatacgccgtggccgtggccagacacggaaagtttaaagccgaccagtggttcgcctactgcgccgctcatgtgcctccaaccagaatcctggaacgcgtggaaatcgatcacacccctctggatctgatcctgctggacgatgagctgctgatccctatcggcagaccctacctgacactgctgatcgacgtgttcagcggctgcgtgctgggctttcacctgagctacaagagccccagctatgtgtctgccgccaaggccatcacacacgccatcaagcccaagagcttcgacgccctgaacatcgagctgcagaacgactggccttgcttcggcaagttcgagaacctggtggtggacaacggcgccgagttctggtccaagaatctggaacacgcctgtcagagcgccggcatcaacatccagtacaaccctgtgcggaagccctggctgaagcccttcatcgagagattcttcggcgtgatgaacgagtacttcctgcctgagctgcccggcaagaccttcagcaacatcctggaaaaagaagagtacaagcccgagaaggacgccatcatgcggttcagcaccttcgtggaagagttccacagatggatcgccgacgtgtaccaccaggacagcaacagcagagagacacggatcccaatcaagcggtggcagcagggcttcgatgcctatcctcctctgaccatgaacgaggaagaagaaacccggttctccatgctgatgcggatcagcgacagcagaaccctgaccagaaacggcttcaagtaccaagagctgatgtacgacagcacagccctggccgattaccggaagcactaccctcagaccaaagaaaccgtgaagaaactgatcaaggtggaccccgacgacatcagcaagatctacgtgtacctggaagaactcgagagctatctcgaggtgccctgcaccgatcctaccggctatacagatggcctgagcatctacgagcacaagaccatcaagaaaatcaaccgggaagtgatccgcgagagcaaggattctctgggcctcgccaaagccagaatggccatccacgagagagtgaagcaagagcaagaggtgttcatcgagtccaagaccaaggccaagatcaccgccgtgaaaaagagagcccagattgctgacgtgtccaacaccggcaccagcaccatcaaggtgtccgaggaatcagccacacctgtgcagaagcacatctccaacgacaacagcgacgactgggccgacgatctggaagcctttgagtga

SEQ ID NO: 307 - DNA, 1002 bp, Artificial Sequence
  Synthetic
atgaatgccctgaccgagatccagatcgagaagctgcggaacttcagcgactgcatcgtgatgcaccctcagatcaagaccatcttcaacgacttcgacgagctgcggctgaaccggaagttccagagcgatcagcagtgtatgctgctgattggcgataccggcgtgggcaagagccacaccatcaaccactacaagaaacgcgtgctggccacacagaactacagccggaataccatgcctgtgctggtgtccagaatcagcagaggcaaaggcctggacgccacactggttcagatgctggctgacctggaactgttcggcagcagccagattaagaagcggggctacaagaccgacctgaccaagaaactggtggaaagcctgatcaaggcccaggtggaactgctgattatcaacgagttccaagagctgatcgagttcaagtccgtgcaagagcggcagcagatcgccaacggcctgaagttcatcagcgaagaggccaaggtgcccatcgtgctcgttggaatgccttgggccgccaagattgccgaggaacctcagtgggcctctagactcgtgcggaagcggaagctggaatacttcagcctgaagaacgacagcaagtacttccggcagtacctgatgggcctcgccaagaaaatgcccttcgacgtgccacctaagctggaaagcaagaacaccacaatcgccctgttcgccgcctgcagaggcgagaatagagccctgaaacatctgctgctggaagccctgaagctggccctgagctgcaacgagtacctggaaaacaagcacttcatcaccgcctacgacaagttcgacttcttcaatgacaaagagaagctcaagagcaagaaccccttcaagcaggacatcaaggacatcgagatctacgaagtgatcaagaacagcagctacaaccccaacgctctggaccccgaggacatgctgaccgatagagtgttcgccatcgtgaagtga

SEQ ID NO: 308 - DNA, 1230 bp, Artificial Sequence
  Synthetic
atggccttcctgttcagccctagagccagagcctttagcgacgagagcctggaaagctacctgctgagagtggtgtccgagaacttcttcgacagctacgagggcctgagcctggccatcagagaggaactgcacgagctggattttgaggcccacggcgcctttccaatcgacctgaagagactgaacgtgtaccacgccaagcacaacagccacttccggatgagagccctgggcctgctggaaacactgctggacctgcctagatacgagctgcagaaactggccctgctgaagtccgacatcaagttcaacagcagcgccgctctgtacaacaacggcgtggacatccctctgcggttcatcagacatcatgccgagggcgctgtggacagcatccctgtttgtcctcagtgcctggccgaggaagcctacatcaagcagagctggcacatcaaatgggtcaacgcctgcaccaagcaccagtgtgccctgctgcacaattgccctgagtgctgcgcccctatcaactacatcgagaacgagagcatcacccactgcagctgcggcttcgaactgagctgtgccagcacaagccccgtgaacacactgagcatcgagcacctgaacaagctgctggacaagggcgagagaaacgacagcaacccactgttcaacaacatgaccctgaccgagagattcgccgcactgctgtggtatcaagagcggtacagccagaccgacaacttctgcctgaacgacgccgtgaactacttcagcaagtggcctgccgtgttcaacaccgagctggacgagctgagcaagaacgccgagatgaagctgatcgacctgtttaacaagaccgagttcaagttcatcttcggcgacgccatcctggcctgtcctagcacacagaagcagagcgagagccacttcatctacaaagccctgctggactacctggtcaccctggtggaaagcaaccccaagaccaagaagcccaacgccgccgatctgctggtgtctgttctggaagctgccactctgctgggcacctctgtggaacaggtgtacagactgtaccaggacggcatcctgcagaccgccttccggcacaagatgaaccagcggatcaacccctacaagggcgccttctttctgcggcacgtgatcgagtacaagaccagcttcggcaacgacaaggcccggatgtatctgagcgcttggtga

SEQ ID NO: 309 - DNA, 699 bp, Artificial Sequence
  Synthetic
atgaccaactgcctgttcctgctgttcagcctgtacagcatccccagaaagaccctgggcagctgcatgtacatccggaacctgagaaagccctctccgaacaagaacatcttcaagttcgccagcaccaaggtgtcccacgtgatcatgtgcgagagcaccctggaattcgacgcctgcttccaccacgagtacaacgacgccatcgagagctacggctctcagcctgagggcttcaagtaccagttcatgggcaagagcctgccttacacacccgacgctctgatcctgtacaagaacagcgtggaaaagtaccatgagtacaagccctacagccagatcagcagccctctgttcagagagaagttcgccgccaagagaatcgccagcctgaagctgggcagagatctgatcctcgtgaccgaccggcagatcagagtgaagcccatcctgaacaatctgaagctgctgcaccggtacagcggcgtgtacggcgttaacaccgtgcagaatgagctgctgaccctgatccagaagtccggcagcatcaagctgaacgacgtgtcctctcaagtgggcctgagcatcggagtggccagaagctttctgtacgccctgattcacaagggcttcgtgaaggccgacctgggaagagatgacctgaccatcaatcccacactgtggcccgtgtacgactga

SEQ ID NO: 310 - DNA, 1839 bp, Artificial Sequence
  Synthetic
atgatcgacttctacgacgagttcgacgagtctatcgcccctaacaagcccaagacacccatccagtacgtgaagctggaagatgccaacctgatcaagcgcgacctggatacctttcctgacttcctgaaagagcaggccctggataagtacgagctgatctcccagatcgacaaagagatcgaaggcggctggaccaagaagaacatcgaccccatcctggaaaagctgttcgacagcaacagcttcaacagacccaactggcggacagttgtgcggtggcggaagaagtatatcgagagcagcggcgatctggccagcctggtcaatgagagacacaagatgggcaaccgcaagaagcggatcaagggcgacgaggccttcttcgatacagccctggaaagattcctggacgccaagaggcctaccgtgtccaccgcctacaagtactacaaggacctgatcatcatcgagaacgagaagatcgtggaaggcaagatccccaccgtgtcctacaccgccttcaacaagagaatcaaggccctgcctccttatcctctggccgtggccagacacggcaagttcatggctgatcagtggttcgcctactgcagcagccatctgcctccaaccaggattctggaacgcgtggaaatcgatcacacccctctggatctgatcctgctggacgacgagctgctgatccctctgggcagaccttacctgacactgctggtggatgtgttcagcggctgcatcatgggcttccacctgagctacaagtgccccagctatgtgtctgccgccaaggccatcacacacgccatcaagcctaagagcctggaatccatcggcatcgagttccagaacgactggccctgctacggcaagatcgagaacctggtggtggacaacggcgccgagttttggagcaagtctctggaacacgcctgtcacagcgccggcatcaatatccagtacaaccccgtgcggaagccctggctgaagccctttgtggaacggttcttcggcgtgatcaaccagcacttcctgagcgagctgcccggcaagaccttcagcaacattctggaaaaagaagagtacaagagcgagaaggacgccatcatgcggttcagcaccttcgtggaagagttccacagatggatcgtggacgtgtaccaccaggacagcgacagccgggacacaagaatccccatcagacagtggaagtccggcttcgatgtgtaccctccactgaagatgaagaacgaggaagaggaacgcttcagcgtgctgatgcacatcagctccgagcggaccctgaccagaaacggcttcaagttcgaggaactgatgtacgacagcactgccctggccgactaccggaagcactaccctcagagcaagaaaaccatcaaaaagatcatcaaggtggaccccgacgacatcagcaagatctacgtgtacctggaagaactgaacagctatctggaagtgccctgcacagaccccagcagctatacaaagggcctgagcatccacgagcacaagaccattaagaagatcaaccgcgagatcatccgggaaagcaagaacagcctgggcctcgccaaagccagaatggccatccacgaacgcgtgaagaaagaacaagagttcttcgtggccagcaagagcaccgccaagatcagcaccgtgaagaagcaggcccagctggccgacatctgcaataccggcaagggcaccatccggatcagcaaggatgagacaaccagcatgcagcccaacaagagcaaccacatcttcgacaactgggacgacgacctggaagccttctga

SEQ ID NO: 311 - DNA, 1005 bp, Artificial Sequence
  Synthetic
atgaacaccctgaccgagatccagatcgagcagctgcggaagttcagcgactgcatcgtggtgcaccctcagatcgaagtgatcttcaacgacttcgacgagctgcggctgaaccggaagttccagagcgatcagcagtgcatgctgctgaccggcgatacaggcgtgggaaagtcccacgtgatcaaccactacaagaaacgcgtgctggccacgcagaactacaatcggagcacaatccccgtgctggtgtccagaatcagcagcggcaaaggcctggacgccacactgatccagatgctgacagacctggaactgttcggcagcagccagcggaagaagagaggctacaagaccgacctgaccagaaagctggtggaaagcctggtcaaggcccaggtggaactgctgattatcaacgagttccaagagctgatcgagttcaagtccatccaagagcggcagtctatcgccaacggcctgaagttcatcagcgaagaggccaaggtgcccatcgtgctcgttggaatgccttgggccgagatcattgccgaggaacctcagtggtccagcagactcgtgcggaagcggaagctggaatacttcagcctgcagcgggacagcaagtactaccggcagtatctgatgggcctcgccaagaacatgcccttcgatgtgcctccagagctggaagataagcacaccgctatcgccctgttcagcgcctgtagaggcgagaacagagccctgaaacatctgctgagcgagagcctgaagctggccctgacctgcaacgagtacctggaaaacaagcacttcatctccgccttcgacaagctgtacagaagcggcgagacagacagcacccagggcaagaagaacctgaagaaccccttcaagcaggacgtgaaggatatcgtggtgtccgagatgatcgagcactccaagtacaaccccaacgctctggaccccgaggacatgctgactggcagagtgttcagctga

SEQ ID NO: 312 - DNA, 1230 bp, Artificial Sequence
  Synthetic
atgagcttcctgttcagccccgagacaagagccttcgccgatgagagcctggaaagctacctgctgcggatcatcagcgagaatttcttcgagagctacgaggaactgagcctggccatcagagaggaactgcacgagctggactttgacgcccatggcgcctttccaatcgacctgaagcggctgaatgtgttccacgccaagcacaacagccacttcagaatgagagccctgagcctgctggaaaccctgctggatctgcctagacacgagctgcagaaactggccctgctgaagtccaacaagaccttcaacacctctatcgccctgcaccggaacggcgtggacatccctctgaagttcatccggtacaacggcaccgacggcatcagcacaatccctgtgtgtcctcagtgcctgagcgaggaagcctacatcaagcagagctggcacctgaaatgggtcaacaactgcaccaagcacgagtgcgccctgctgcactactgccctgagtgtaacctgcctctgaactacatcgagaacgagagcatcacccactgcagctgcggctttgaactgagcgccgccagcaccaacagcaccgataagcagagcatcgacgtgctgaagatgctgatgctgaacgacgccagcagcgacaaccctctgttcaagagcaccagcatctcccagagactggccacactgctgtggtatcaggacagatactctgccgccgacaccttctgcctgaacgagatcgccgactacttcaacaagtggcccgagatcctgtacaaagagctggattacctgagccagcgggccgagatcaagctgatcgacctgtttaacaagaccgccttccggttcatcttcggcgagctgatcctgagcgtgccccacaacaatcagtccgaggaacagctgcacttcatccggatcaccctgatggactacctggtgctgctggtggaaaagaaccccaagagcaagaaacccaacgtggccgacatgctggtgtccgtgtcagaggtggccatcatcctgggcacaagccacgaacaggtgtaccggctgtaccaggacggcatcctgcagagcgtgttccggcacaagatgaagcagcggatcgaccctcacagctgcgtgttctttctgcggcaagtgatcgagtacaagagcagcttcggcgtgaacaagtccagaatctacctgagcgcctggtga

SEQ ID NO: 313 - DNA, 666 bp, Artificial Sequence
  Synthetic
atgcggaccaagctgatgaagatggtcatcctgctgatgtatatccggaacctgcggaagccctctccaaacaagaacgtgttcaagttcgccagcaccaaggtgtccagcgtggtcatgtgtgaaggcaccctggaattcgacgcctgcttccaccacgagtacaacgacctgatcgagagcttcggctctcagcccgagggctttaagtacgagttcatgggcaagagcctgccttacacacccgacgctctgatcagctacaccgacaagacccagaagtatcacgagtataagccctacagcaagatcgcctctcctctgttccgggccgagtttgccgctaaaagagccgcctctctgaagatgggcattgacctgatcctggtcaccgaccggcagatcagagtgaaccccatcctgaacaacctgaagctgctgcacagatacagcggcgtgtacggcatcagcagcatccagaatgagctgctgagcttcatccacaagagcggcgtgatcaagctgaacgacatcagctcccagatcggcctgcctatcggcaagaccagaagcttcatcttcggcctgatgcacaagggcctcgtgaaggctgatctgggctgcgacgacctgaccaacaatcccacactgtgggccacaccttga

SEQ ID NO: 314 - DNA, 1854 bp, Artificial Sequence
  Synthetic
atgggctacaccatgaccgatttcttcaacgagttcgacggcagcctgacacctctgaagccccagacacctaagcagtacgtgaagctggacgacagcaacctgatccagagagatctggacaccttctccgacaccttcaagaatcaggccctgcagcggtacaagctgatcatcagcatcgacaagaagctgagcgccggctggacccagagaaacctggatcctatcctggacgagatcttcaaagaggacgagcaggccagacctaactggcggacaattgccagatggcggaagaagtacctggaaagcaacggcgatctggccagcctggtggtcaagaaccaccggatgggcaacagaatcaagcggatcgagggcgacgagagcttcttcgacaaggccctggaaagattcctggacgccaagaggcctacagtggccacagcctaccagtactacaaggacctgatcgtgatcgagaacgagagcatcgtggaaggcaagatccccatcatcagctacaacgccttcaacaagcgcatcaaggccattcctccatacgccgtggccgtggccagacacggaaagtttaaagccgaccagtggttcgcctactgcgccgctcatgtgcctccaaccaggattctggaacgcgtggaaatcgatcacacccctctggatctgatcctgctggacgatgagctgctgatccctatcggcagaccctacctgacactgctgatcgacgtgttcagcggctgcgtgctgggctttcacctgagctacaagagccccagctatgtgtctgccgccaaggccatcacacacgccatcaagcctaagagcctggatgccctgaacatcgagctgcagaacgactggccttgcttcggcaagttcgagaacctggtggtggacaacggcgccgagttctggtccaagaatctggaacacgcctgccagtctgccggcgtgaacatccagtataaccccgtgcggaagccctggctgaagcccttcatcgagagattctttggcgtgatcaacgagtacttcctgcctgagctgcccggcaagaccttcagcaacatcctggaaaaagaagagtacaagcccgagaaggacgccatcatgcggttcagcaccttcgtggaagagttccacagatggatcgtggacgtgtaccaccaggacagcaacagcagagagacacggatcccaatcaagagatggcagcagggcttcgacgcctatcctccactgaccatgagcgaggaagaagaggccagattcgacatgctgatgcggatcagcgacagcagaaccctgaccagaaacggcatcaagtaccaagagctgatgtacgacagcacagccctggccgactaccggaagcactaccctcagaccaaagagacaatcaagaaactgatcaaggtggaccccgacgacatcagcaagatctacgtgtacctcgaggaactggaaagctacctggaagtgccctgcaccgatcctaccggctatacagatggcctgagcatctacgagcacaagaccatcaagaagatcaaccgcgagatcatcagagagagcaaggacagcctgggcctcgccaaagccagaatggccatccacgaaagagtgcggcaagagcaagaggctttcatcgagtccaagaccaaggccaagatcaccaccgtgaagaaacaggcccagattgccgacgtgtccaataccggcaccggcaccattaaggtgtccgaaaagtctgccgctcctgtgcagaagaacatctccaacgacatcttcgacgactgggacgacgacctggaagccttcgaatga

SEQ ID NO: 315 - DNA, 1002 bp, Artificial Sequence
  Synthetic
atgaatgccctgaccgagctgcagatcggccagctgagaaacttcagcgactgcatcgtgatgcacagccagatcaagaccatcttcaacgacttcgacgagctgcggctgaaccggatcttccagagcgatcagcagtgtatgctgctgattggcgataccggcgtgggcaagagccacaccatcaaccactacaagaaacgcgtgctggccacacagaactacagccggaataccatgcctgtgctgatctcccggatctctagaggcaaaggcctggacgccacactgatccagatgctggctgacctggaactgttcggcagctcccagattaagaagcggggctacaagaccgacctgaccaagaaactggtggaaagcctgatcaaggcccaggtggaactgctgattatcaacgagttccaagagctgatcgagttcaagtccgtgcaagagcggcagcagatcgccaacggcctgaagttcatcagcgaagaggccaaggtgcccatcgtgctcgttggaatgccttgggccgccacaattgccgaggaacctcagtgggcctctagactcgtgcggaagcggaagctggaatactttagcctgaagaacgacatcaagtacttccgccagtacctgatgggcctcgccaagcagatgcccttcgatgagcctcctaagctggaaagcaagaacaccacaatggccctgttcgccgcctgcagaggcgagaatagagccctgaaacatctgctgtctgaggccctgaagctggccctgagctgtaacgagcacctggaaaacaagcacttcatcaccgcctacgagaagttcgacttcttcaatgacaaagagagcctcgagctgaagaaccccttcgagcaggacgccaaggacatcgtgatctacgaagtgatcaagagcagcagctacaaccccaacgctctggaccctgagcacatgctgaccggcagaaagttcgccatcctgaagtga

SEQ ID NO: 316 - DNA, 1230 bp, Artificial Sequence
  Synthetic
atggccttcctgttcagccctaaggccagagcctttagcgacgagagcctggaaagctacctgctgagagtggtgtccgagaacttcttcgacagctacgagggcctgagcctggccatcagagaggaactgcacgagctggattttgaggcccacggcgcctttccaatcgacctgaagagactgaacgtgtaccacgccaagcacaacagccacttccggatgagagccctgggcctgctggaaacactgctggacctgcctagatacgagctgcagaaactggccctgctgaagtccgacatcaagttcaacagcagcgccgctctgtacaagaacggcgtggacatccctcagaagttcatccggtatcaccccgaggacgccgtggatagcattcctgtgtgtcctcagtgcctggtggaagaggcctacatcaagcagagctggcacatcaaatgggtcaacgcctgcgtgaagcaccagtgtgccctgctgcacaattgccctgagtgctgcgcccctatcaactacatcgagaacgagagcatcacccactgcagctgcggcttcgaactgacctgtgccagcacaagccctgccaacacactgagcatcgagcacctgaacgagctgctggacaagagcgagcggaacgacagcaaccctctgttcaacaacaccacactgaccgagagattcgccgcactgctgtggtatcaagagcggtacagccagaccgacaacttctgcctggatgacgtcgtgggctacttcaacaagtggcccaccgccttctacaaagagctggacgagctgagcaagaacgccgagatgaagctgatcaacctgtttaacaagaccgagttcaagttcatcttcggcgacgccatcctgagctgccccaacacacagaagcagaaagagctgcacttcatctacagagccctgctggactacctggtcaccctggtcgagagcaatcccaaggccaagaaacccaacgccgccgatctgctggtgtctgtgcttgaagctgccactctgctgggcacctctgtggaacaggtgtacagactgtaccaggacggcatcctgcagaccgccttccggcacaagatgaaccagcggatcaacccctacaagggcgtgttcttcctgcggagagtgatcgagtacaagaccagcttcggcaacgacaagacccggatgtacctgagcgcttggtga

SEQ ID NO: 317 - DNA, 630 bp, Artificial Sequence
  Synthetic
atgtacatccggaacctgcggaagccctctccaaacaagaacgtgttcaagttcgccagcgccaaggtgtccgagacaatcatgtgcgagagcaccctggaattcgacgcctgcttccaccacgagtacaacgaaaccatcgagacattcggcagccagcctaagggcttctactactgcttcgagggcaagagactgccctacacacccgatagcctgctgcactacatcgacggcaccaccaagttccacgagtataagccctacagcaagaccttcgatcccatcttccgggccaagttcgtggccaagaaagaggctgctagagccctgggcacagagctgatcctggtcaccgacaagcagatcagagtgaaccccatcctgaacaacctgaagctgctgcaccggtacagcggcatctacggcgtgaccgatatccagagagaactgctgcagctgatccggaagtccggcaaggttcagctgcacgatatcgccagcgagtacaagctgcctatcgccgagacaagaagcttcctgtacagcctgatcaacaagggactgatcaaggccgacctgaaccaggacgacctgagctgcaatcctagcgtgtggtgcaacgcctga

SEQ ID NO: 318 - DNA, 1854 bp, Artificial Sequence
  Synthetic
atgatggacttcgaggacgagttcaccgtgtccaccagcgtgaagaagcctgagacacccgctcagtacgtgaagctggacgatagcgagctggtcaagcgcgacctggatacctttcctgacttcctgaaagagaaggccctggacaagtacaagctgatctccttcatcgagcaagagaacagcggcggctggacccagaagaagctggatcccatcctggataagctgttcgagggcaacagagacaagcggcccaattggagaacagtcgtgcggtggcggaagtcctacatcgacagcaatggcgatctggccagcctggtggtcaagagacacaagatgggcaatcgcaacaagagagtggaaggcgacgaggtgttcttcgagagagccctgagcagattcctggacgccaagaggcctaaagtgaccaccgcctaccagtactacaaggacgccatcaccatcgagaacgagacaatcgtggacggacagatccccatcatcagctacaccgccttcaaccagcggatcaagagcctgcctccttatcctatcgccgtggccagacacggcaagttcaaagccgatcagtggttcgcctactgcagctctcacatccctccaaccagaatcctggaacgcgtggaaatcgatcacacccctctggacctgatcctgctggatgacgagctgctgatccctctgggcagaccctacctgacactgatcgtggatgtgttcagcaactgcgtgctgggcttccacctgagctataaggcccctagctatgtgtctgccgccaaggccattgtgcacgccatcaagcctaagacactgagcaacgtgggcatcgagctgcagaacgactggccttgctatggcaagttcgagacactggtggtggacaacggcgccgagttttggagcaagtctctggaccacgcctgcaaagaggccggcatcaacatccagtacaaccccgtgcggaagccctggctgaagcccttcgtggaaagattcttcgggatgatcaaccagtacttcctgaccgagctgcccggcaagaccttcagcaacatcctggaaaaagaggactacaagcccgagaaggatgccatcatgcggttcagcgtgttcgtggaagagttccacagatggatcgtggacatctaccaccaggacagcgacagccgggacacacggatccctattaagcagtggcagcacggcttcgatatctaccccagcctgcagatgggcgtcgaggatgaggaacggttcaacgtgctgatgggcatcaccgacgagcggagactgaccagaaacggcttcaagtttgaggaactgatgtacgacagcacagccctggccgactaccggaagcactaccctcagaccaaggataccatcaagaagctgatcaagatcgaccccgacgacctgagcagcatccacgtgtacctggaagaactggaaggctacctgaaggtgccctgcaccgataccacaggctatacactgggcctgagcctgcacgagcacaagatcaccaagaagatcaaccgcgagatcatcagagagagcaaggacaacctgggcctcgccaaagccaggatggccattcatgccagagtgcagcaagagcaagagctgttcaacgagtccaagaccaaggccagactgagcggcgtgaaaaagcaggcccagctggccgacatcagcaataccggacagggcaccatcaagctggaaaagtctaacagccccagcgtgatcaccaacaagcctgagccaaacatcagcgatatcctggacaactgggacgacgacatcgagggcttcgagtga

SEQ ID NO: 319 - DNA, 1032 bp, Artificial Sequence
  Synthetic
atgagcacactgacagccctgcagatggaactgctgcggagattcagcgactgcttcgtgatgcaccctcaggccagaaccatcttcaacgacttcgacgacctgcggctgaaccggaacttccagagcgatcagcagtgcatgctgctgaccggcgatacaggcgtgggaaagagccacctgatcaacaactacaagaaacgcgtgctggcctctcagatctacagcagaaccagcatgcccgtgctggtcaccagaatcagcagccacaaaggcctggacgccacactgagacagatgctggccgacctggaaagctttggcagccagcagagaaagggccccaattacaagatcgacctgaagaaccagctcgtgaagaacctcgtgcgggccaatgtcgagctgctgatcttcaatgagttccaagagctgatcgagttcaagacccctaaagagcggcagacaatcgccaacgagctgaagttcatcagcgaggaagccagaattcccatcgtgctcgtgggcatgccttggacagaacagatcgccgaggaaccccagtggtccagcagactgatccggaagcggaacctggaatacttcagcctgcagaaggacagcaagtactaccggcagtacctgatcggcctggccaagtacatgcccttcgacgagcctccaaagatcgaggacaagcacattgccattcctctgttcgccgcctgcagaggcgagaatagagccctgtctcatctgctgagcgagacactgaagctggtcatggtcaacggcgacagaagcctggacatcagacatctggcccagacctacaagaagctgtacgaaggccaaggcagcggcagcaccaaggtgttcttcaaccccttcctggaacctctggacaaggtgctgatctccgaggtggtcaagcccagcagatacaaccccaacgccatgacacccgacgacatgctgatcaagagagagttcagcacccctagcacactggaccagctgctgagcaagtga

SEQ ID NO: 320 - DNA, 1236 bp, Artificial Sequence
  Synthetic
atggccttcctgttcagccctaacgccagagcctttagcgacgagagcctggaaagctacctgctgagagtggtggccgagaacttcttcgacagctaccagcagctgagcctggccatcagactggaactgcacgagctggattttgaggcccacggcgcctttccaatcgagctgaagcggctgaacgtgtaccacgctcagcacaacagccacttccggatgagagccctgagcctgctggaatccctgctggatctgcctcctcacgagctgcagaaactggccctgctgaggtccaacagaaccttcgttggcggcatgagcgccgtgcacagaaacggcatcgatatccctctgagcttcatcagaaacgccggcgagaatggcatcgagagcgtgccaatctgccctcagtgcctgaaagagaagccctacatccggcaagtgtggcacctgaagcctgtggaagtgtgcgccaagcactcttgcgagctgctgcaccagtgtcctgagtgccagcagcctatcaactacatcgagaacgagtctatcgcccactgcagctgcggattcgaactggctacagcccctagcgtgaaggccgattctcaggctgtgctgctgagcagaagcctgtttgacggcgacgccctgagcaacaaccctctgctgtttatgggcaccagcgccacacacagattcgccgctctgctgtggtatcagaagcggcacgccaagaacaccgagtgcatgacacacggcagcgtgggctacttcgaggattggcctaccagcttctaccgcgaactggacgctgtgacaacaggcgctgaagtgcggctgatcgacctgttcaaccggaccagcttccggtccatctacggcgagctgatcctggactctcagtgtctgctgcccgaggacaaagagccccacttcatctatctggccctgatggagtacatcagcaagctggtggaatctcaccccaagagcaagaaacccaacgtggccgacatgctggtgtccgtggctgaaacagcagtgctgctgtccaccacacacgaacaggtgtaccggctgtaccaggatggcgtgctgacagccggcttcaagcagaagatccggaccagaatcggaccccacatcggcgtgttctacctgcggcaagtgatcgagtacaacaccagcttcggcaacgacaagcagggcatgtacctgagcgcttggtga

SEQ ID NO: 321 - DNA, 627 bp, Artificial Sequence
  Synthetic
atgtacagaaggcacctgggccacagcagagtgaagaacctgttcaagttcgtgtccgccaagatggacaccgtgttcaccgtggaaagcgccctggaattcgacgcctgcttccacctggaatactcccacgacatcaccagctacgaggcccagcctgagggcttcttctaccagttcaacggcagaccctgtccttacacacccgacttcaagatcaaccacgccgtgaacggcatccagttcctcgagatcaagcccatcgaaaagaccaacgacgccgacttcatcgagcggttcaaggccaagagaacccagagcacccagaacggcctgcctctgatcctggtcaccgagaagcagatcagaatcaaccccatcctgtacaacctgaagctgctgcacagatacagcggcagcaagcacctgaccagcgtgcagatctacctgctgagcgaagtgaagaagctgggcaaagtctccatcgagttcctcatcaacaacatcaagacgaacgaggacaacatgttcagcctgatcctgaacctgctggccaagggctacctgcggagcaacatcaccgacaacatcttcaacatgaacaccaccgtgtggtgcaaagagtga

SEQ ID NO: 322 - DNA, 1896 bp, Artificial Sequence
  Synthetic
atgaaccagaacgacggcgcccaagagttcggcatcttccaggacgagttccccgacgccaccaacgaggaactgaccaaggacaagaaactgcagcccgtgttcatcaagcgcgacctggatagcttcagcgaggacatgaaggccctggccatctaccggctgaactacatccagtggatccagagcaacatctgcggcggctggacccagaaaaacctggtgcctctgatcgagaaggccaaggatgagctgggagagcctgctcctgaatggcggacacttgctagatggtggtcccggtacaagaaaagcggcttcaaagtgacctctctgatccctcagcacaagaacaagggcaacagaaagccccgcttcgacaacatcgaggaagaactggcccagaacgccatcaccgagtacctggacgagaagaagccctctatcgccagcgtgtaccaggactacaaggacgacatcatcctgcagaacgagtaccggaccgacctgaagaaaaccatcaagcctatcagctaccagggcttctgcaagaagattaagaagatcagcacacacgccctgatcagcgcccggaagggcaaatatgaggccgagctgaacttcagatacgtggccagccacaagcctccaaccagagtgctggaaagagtggaactggatcacacccctatcgatatcattctgctggacgacgagctgctgatcccactgggcagagcctatctgaccctgctgatcgacagctacagccactgcatcctgggcttcaacctgggctttaacgagcccggcttttaccccgtgcggaacacactgctgcacgccttcaagcccaagacctacatccgggatcagtaccccgacctgatccacgattggcctcaccacggaaagcccgagacaatcgtggtggacaacggcgtggaattctggggccaagacctggaacagacctgcaaagaactgcacatcaacgtgcagtacaaccctgtgcgcaagccctggctgaagcctctggtggaaagaagcttcggcatcatcaacagcaaggtgctggatcagatccccggcaagaccttcagcagcatcctgaagagattcgactacgaccccgtgaaggacgccgtgttcagattcagcagcttcatcgagcatctgcacgagtggatcatcgacgactaccacttcagccccgacagccggaagcggtacatcccttatctgctgtggcagacaggcgccagcgagttccctccaaagcagttcaccacagaggaacagcaagagctggacgtgatcatcagcttcaccgacaagcggacccacagcacaggcggcatcgatatccacagcctgcggtacaacagcgagatgctggccgagttccggaagatgtacgacgagaagcagctcaagaccaaagtgctggtcaagacaaaccccaacgacatcagccatgtgcacgtgttcattgagagcatcggcaagtacatcaaggtgccctgcatcgacgccgtgggctacacatctggactgtctctgcagcagcacaaaatcaacctgcggctgcagcatgagtacatcgacaagagcaccgacatcgtggccctggctaaagtgcggcggaagctgaaagagagaatccagagagagatcgacgagatcaccagcagcagaaagaagcacaccctgaagcacgccagcagactggccaaataccagggcgttagctcccagcagaacagcacaatcgccgagaacgacttcagcgccatgcagagcagccagaacaaggatgccatcaagaacatcagcgacaccaagtacaacaccgacgagtgggaagatttcgtgtccaagctggacccctactga

SEQ ID NO: 323 - DNA, 1044 bp, Artificial Sequence
  Synthetic
atgggcagattctgcatcgagatcggcagcctgctgatgaaccagctgagcgacaagaaccagcagaaactgctgctgttcatccagtgcttcgtggaaacccctatggccaagctgatcttcgacgacttcgaccggctgcggtacaaccagaagtttggcggagagcagcagtgcatgctgattactggcgacgccggctgtggcaagagcagcatcatcaaccactacaagcagcagtaccccaaccagctgcaggccggcttcatcaacaatcccgtgctggtgtctcggatccccagcaagcctacactggaaagcaccatgatcgagctgctgagagatctgggccagttcggcagcagcctgagaaagcacatcagcaacgacaagagcctgaccgagagcctgatcacctgtctgaagaagtgccggaccgagctgatcatcatcaatgagttccaagagctgatcgagaacaagaccagagagaagcggaaccagatcagcaaccggctgaagttcatctccgaggaagctcagatccccatcgtgctcgtgggaatgccttgggccgtgaagattgccgaggaaccacagtgggccagcagactgctgatcagaaggcagatcccctacttcaagctgtccgagaatcccgagaactttatccggctgctgatgggcctcgccaagtacatgcctttcgccatcaagcccaagctggaagagaagcacagcacatacgccctgttcagcgccagctctggctgtctgagaaccctgaagcacttcctggacgagagcgtgaagcaggccctgatcgtggatgccgagactctggccaatgagcacatggccaaagccttcgccatctatcaccccgaggaaatcaacccattcctgcagcctatcgacgagatctgtgcccgggaagtgaagaagtacagctactacgacgtggacgcccacgaggacgaacagttgagccctctgcagtacaccgacaagctgagcattggacagctgctgaagctgcggtga

SEQ ID NO: 324 - DNA, 1239 bp, Artificial Sequence
  Synthetic
atgcagctgctcgtcagacctgctcaccacgccgatgagagcctggaaagctacctgctgagactgagccaagagaacggcttcagcagctacaccgagatgagcaccgtgctgaagctgtggctgcagagccacgatcatgatgccggcggagtgttccctatcgagctgagcatggtcaacgtgtaccacgccaacagaagcagcagcttccggatcagagccctgaggctgatcgagcacctgaccgaacagacccctctgaagctggtggaactggccctggtgcacagctctgcccacttcggctctaacatcaaggccgtgcacagaaccggcgtggacgtgccaaagcagttcctgagaacccacagcatccctgtgtgccccaaatgtctgcaggccgacggctacatcagacagctgtggcactaccagccttacaccgcctgtcacatccaccactgccagctgaccgatcactgtcctgcttgtggcgccgagctggactacctgaagaacaagagcatcgaagtgtgcgagtgcggcttccacctgtgctacgccaagtgtatcgagcccagcgacgagcagatcaagctgagccagctgatcgccgagtgtcccttcgagaacagcaccaatcctctgctggcctctcagaacctgagcttcagattcggcgccctgttctggtacttcaaccggtacaaacagcagcagaccagcaacgacggcatcagcgaggccctgaatagcgccatcacctacttcgaggactggcccgacaacttcttcgccgaactggaacagcagattgagcacttctaccaggtccagatcaagaaagtgaaccagaccgccttctacgaggtgttcggcagcctgctgaccgactgtagcagactgcctatgagcgacctgagccacaacttcatcctgaaaaccgtgatcgacttcttcgtgcaccaagtggaaacaaaccccaagagcaagaaggccaacatcggcgacgtgctggtcacccctgaagaagctgcacatctgctgagcaccgacattgagcagatctaccggctgcaccaagagggcttcatcaccctggccatcacacccagcacaaagtggcacatcagcgcctacctgcctatcctgtacctgcggcaagtgatggaactgcggctggccagaatccacagccagaacaatgtgtacgagacatacctgagcgcctggtga

SEQ ID NO: 325 - DNA, 639 bp, Artificial Sequence
  Synthetic
atgtacatccggaacctgcggaagccctctccaaacaagaacgtgttcaagttcgccagcgccaagatcaacaacgtgatcatgtgcgagagcaccctggaattcaacgcctgcttccaccacgagtacaacgacgagatcgagagctacggcagccagcctaagggctttaagtacgagttcaacggcaagaacctgccttacacacccgacacactgatcatctacaagaacggcaacgagaagtaccatgagtacaagcccttcagcaagatcagcagccctctgttcagagagaagttcaaggccaagaagcaggccagcctgatcctgggcagagagctgatcctgatcaccgacaagcagatctgtgtgaaccccatcctgaacaacctgaagctgctgcaccggtacagcggcatctatggcgtgaacgccgtgcagaaagagctgctgaatctgatcaagaagtccgacgtcatcaagttcaacgacgtgtccagccagctgggcctgtctattggagaggccagaagcttcctgtacgccctgatccacaagggcttcgtgaaggccgatctgagccacgacgacctgaccaacaatcccacactgtgggccgcctacgacggcttttaa

SEQ ID NO: 326 - DNA, 1842 bp, Artificial Sequence
  Synthetic
atgaccggcttcaacgacgagttcgacgagagcatcgtgcccaacaagcccaagacacccatccagtacatccggctggaagatgccaacctgatcaagcgcgacctggacacactgcccgaggctctgaagaacaacaccctggacaagtacaagatcatcagctatatcgccaaagagctgaccgaaggctggacccagaagaacatcgaccccatcctggataagctgttcgacaacgacgacaagaagcggcccaactggcggacaatcgtcagatggcggaagaagtacaacgagagcaacggcgacctgaccagcctgatctctgagcaccacaagatgggcaacagaaagaagcggatcagcggcgacgaggtgttcttcgacaaggccctggaacggttcctgaacgccaaaagacctaccgtgtccaccgcctaccagtactacaaggacctgatcatcatcgagaaccagcacctgttcgagaacaagatccccaccatcagctacgtggccttcaacaagagaatcaagagcctgcctccttacaaggtggccgtggccagacacggcatctttaaagccgctcagtggttcgcctactgcggcgctcataaccctccaaccagaatcctggaacgcgtggaaatcgatcacacccctctggatctgatcctgctggacgacgagctgctgatccctatcggcagaccctacctgacactgctgatcgacgtgttcagcggctgcatcatgggcttccacctgagctacaagtgccccagctatgtgtctgccgccaaggccatctctcacgccatcaagcctaagagcctggacagcatcggcatcgagctgcagaacaactggccctgctacggcaagatcgagaatctggtggtggacaacggcgccgagttctggtccaagtctctggaacacgcctgtcagagcgtgggcatcaacatccagtataaccccgtgcggaagccctggctgaagcccttcgtggaaagattcttcggcgtgatcaaccagtacttcatcagcgagctgcccggcaagaccttcagcaacatcctggaaaaagaagagtacaagcccgagaaggacgccatcatgcggttcagcacctttgtggaagagtttcaccggtggatcgtggacatctaccaccaggacagcgacagccgggacacaagaatccccatcaagaagtggcagaccggctttgaggtgtaccctcctctggaaatgaatcaagaagaggaagagaagttcagcatcctgatgaacatcagcgacgagcggaccctgaccagaaacggcttcaagttcgaggaactgatgtacgacagcacagccctgagcgagtaccggaagcactaccctcagaccaaagagacaatcaagaaaatcatcaaggtggaccccgacgacatcagcaagatctacgtgtacctggaagaactgaacagctacatcgaggtgccctgcaccgatcctaccggctatacaaagggcctgagcatccacgagcacaagaccatcaaaaagatcaaccgcgagatgatccggggcagcaaggatgtgctgggacttgccacagccagaatggccatccacgaaagagtgaagcaagagcaagagctgttcatcaccagcaagaacaagcggaagatcagctccgtgaagaaacaggcccagctggccgacgtgtccaataccggaaccggcacaatcaaggtgtccgagcagaaaagcaccaccaagcaagagaacatctccaacgacatcctcgagaactgggacgacgacctggaagccttcgagtga

SEQ ID NO: 327 - DNA, 1026 bp, Artificial Sequence
  Synthetic
atgaacaccctgaccgagacacagatcgagcagctgcggcagttcaacgactgcatcgtggaacaccctcagatcaagagcatcttcaacgatttcgacgagctgagacagaaccggctgtttcagctggaccagcagtgcatgctgctgagcggagatgctggcgtgggcaagagccacatcatcaaccactaccggaagagagtgctggccaaccagaactacagcagaagcacaatccccatcctgatcagccggatcagcaaaggcaaaggcctggaagccacactgatccaggtgctggctgacctggatctgtttggcagcgagcagcggaagaagcggggctacaagaccgacctgaccaagaagctgatcgagagcctgatcaaggcccaggtggaactgctgatcatcaacgagttccaagagctgattgagttcaagagccggcaagagcggcagcacattgccaacgagctgaagctgattagcgaagaggccaaggtgcccatcgtgctcgtgggaatgccttgggccgaactgattgccgaggaacctcagtggtccagcagactcgtgcggaagagaaagctgagctacttcagcctgaagaacgacaagaactacttcatccggtacatcatgggcctcgccaacaagatgcccttcgaggaaccacctacactgggcgataagcagaccgccaccgccatcttttctgcctgtagaggcgagaaccgcagcctgaaacatctgctgtccgagtctctgaagatcgccctgctgagcaacgagaacctggaaatcaagcacctggctctggccttcgacaagctggaactcctgggaaaagaggcccagcggcagaacaagaagaaagagggcaaagagaagtccgaggacatcgtgatcgacaaccccttcaaccagagcctgaaggacatcgacatcagcgaagtgatcaagcacagccagtacgcccctaacgctctggaccccgaggatattctgaccggcagattc

SEQ ID NO: 328 - DNA, 1245 bp, Artificial Sequence
  Synthetic
atggccttcctgttcagccctaaagtgcgggccttcagcgacgagacactggaaagctacctgctgagagtggtgtccgagaacttcttcgacagctacgagcagctgagcctggccattagagaggccctgcacgagctggattttgacgcccatggcgcctttccaatcgacctgaagcggctgaatgtgtaccacgccaagcacaacagccacttccggatgagagccatcggcctgctggaaaccctgctggacctgcctagattcgagctgcagaaactggccctgctgaagtccgacaagaaattcaacagcagcgtggccgtgcaccgcgacggaatcgatatccctctgaagttcatcagaagcaacggcgccgacggcgagtgtagcctgcctatttgtcctcagtgcctggccgaggaaccctacatcaagcagagctggcacatccggtggatcaacatctgcacaaagcacaagtgcaccctgatccaccagtgtcctgactgcaacctgcctatcaactacatcgagaacgagtctatcgcccactgcctgtgcggctttgatctggccagcgccaccaacagcaacaccaccagcatcaccgtgaagcggaaggacgccgagctgatccacaacctgctgaacaacgaaaccctgatcgacaaccctctgttccgggaaaccaccatcagccagagattcgccgctctgctgtggtatcaagagcggtacagctgcatcgacaatttctgcctgaacgacgccgccaccttcttcagcaagtggcccgagaacctgtacaatgagctggaccacctgagcaagaacgccaacatgaagctgatcgagatgttcaacaagaccatcttccggttcatcttcggcgaagtgatcctgagcgtgccccacagcatccagagagagggccagagacacttcatccggatcgccctgattgactacctgatccggctggtggccaacaatcccaagagcaagaaacccaacgtggccgacatgctggtgtccgtgacagaggtggccatcatcctgggcacaagccacgaacaggtgtaccggctgtaccaggacggcatcctgcagaacgccttccggcagaagatgaatagccggatcgaccctcacaccggcgtgttctttctgcggcaagtgatcgagtacaagagcagcttcggcgacgacaagcccaagatgcacctgtctgcttggtga

SEQ ID NO: 329 - DNA, 630 bp, Artificial Sequence
  Synthetic
atgtacatccggaacctgcggaagccctctccaaacaagaacgtgttcaagttcgccagcgccaaggtgtccgagacaatcatgtgcgagagcaccctggaattcgacgcctgcttccaccacgagtacaacgaaaccatcgagacattcggcagccagcctaagggcttctactacagattcgagggcaagagactgccctacacacccgatgccatcctgcactacatcgacggcaccaccaagttccacgagtataagccctacagcaagaccttcgatcccatcttccgggccaagttcgtggccaagaaagaagccgctcaggccctgggaacagagctgatcctggtcaccgacaagcagatcagagtgaaccccatcctgaacaacctgaagctgctgcaccggtacagcggcatctacggcgtgaccgatatccagagagaactgctgcagctcgtgcggaagtccgacaatatccagctggccgatgtggccagcgagtacaatctgcctatcgccgagacaagaagcttcctgtacagcctgatcaacaagggactgatcaaggccgacctgaaccaggacgacctgagctgcaatcctagcgtgtggtgtcacgcctga

SEQ ID NO: 330 - DNA, 1845 bp, Artificial Sequence
  Synthetic
atggacttcgccgacgagtttaccgagagcaccagcgccaagaagcctgagacaccagctcagtacgtgaagctggacgatgccgagctgctgaagagagatctggatacctttccggacttcctgaaagagaaggccctggacaagtacaagctgatctccttcatcgagcaagagaacagcggcggctggacccagaagaagctggatcccatcctggacagactgttcgagggcaacaccgagaagcggcccaattggagaacagtcgtgcggtggcggaagtcctacatcgacagcaatggcgatctggccagcctggtggtcaagagacacaagatgggcaaccgcaagaaaagagtggaaggcgacgaggtgttcttcgagagagccctgagcagattcctggacgccaagaggcctaaagtgaccaccgcctaccagtactacaaggacgtgatcaccatcgagaacgagacaatcgtggacggcaagatccccatcatcagctacaccgccttcaaccagcggatcaagagcctgcctccttatcctatcgccgtggccagacacggcaagttcaaagccgatcagtggttcgcctactgcagctctcacatccctccaaccagaatcctggaacgcgtggaaatcgatcacacccctctggacctgatcctgctggatgacgaactgctgatccctctgggcagaccctacctgacactgatcgtggatgtgttcagcaactgcgtgctgggcttccacctgagctataaggcccctagctatgtgtctgccgccaaggccattgtgcacgccatcaagcctaagacactgagcaacatcggcatcgagctgcagaacgactggccctgctatggcaagttcgagacactggtggtggacaacggcgccgagttttggagcaagtctctggaccacgcctgcaaagaggccggcatcaacatccagtacaaccccgtgcggaagccctggctgaagcccttcgtggaaagattcttcgggatgatcaaccagtacttcctgaccgagattcccggcaagaccttcagcaacatcctggaaaaagaggactacaagcccgagaaggacgccatcatgcggttcagcgtgttcgtggaagagttccacagatggatcgtggacatctaccaccaggacagcgacagccgggacaccagaattcccatcaagcagtggcagcacggcttcgatatctaccctccactgcagatggaagtcgaggacgagaagagattcaacgtgctgatgggcattgccgacgagcggaccctgaccagaaacggcttcaagtttgaggaactgatgtacgacagcacagccctggccgactaccggaagcactaccctcagaccaaggacaccatcaagaagctgatcaagatcgaccccgacgacctgagcagcatccacgtgtacctggaagaactggaaggctacctgaaggtgccctgcaccgataccacaggctatacacagggactgagcctgcacgagcacaaagtgacaaagaagatcaaccgcgagatcatcagagagagcaaggacaacctgggcctcgccaaagccaggatggccattcatgccagagtgcagcaagagcaagagctgttcaacgagagcaagaccaagacaaagctgagcggcgtgaagaagaaggcccagctggccgatatcagcagcaccggcaagagcacaatcgtgctgcctgagagcgagccccagaagtccatcaactgcaatcaggtcgaggccgagatggaagatgacgactgggacatggacctggaaggatactga

SEQ ID NO: 331 - DNA, 993 bp, Artificial Sequence
  Synthetic
atgaccaagctgaccctgcagcaggacacagccctgaaagaattcggcctgtgcttcatcgagctgcccatcgtgtccgagacattccaggacttcgacgacctgcggttcaaccgggactaccagagcgatccccagtgcatgatgctgacaggcgagacaggcagcggcaagaccagactgatccaagagtaccggcggagagtgaacgccaacagcggctttagacacagcgacgtgccagtgctgatcaccaacatcagcagcaacaaaggcctggaaaacaccctggtgcagatcctgagcgacctggataccttcggctgccaccagaaaaagcggggcatgaagaccgacctgaccaagaaagtcgtgcggaacctgatcgccgccaacgtggaactgctgatcatcaatgagttccacgacctgatcaagttcaagaactaccaagagatccagatcatcacgagcgccctgaagttcatcagcgaggccgccaacattcccatcgtgcttgtgggcatgccttggatgaaggacatcatcaacgacagcgagtggggcagcagactgcggagaagaaagcacctggaatacttcagctacatccggaaagaggacagagagcacttccggctgctgctcgtgggcttcagcaagagaatgagcttcgacaccagacctgtgctgcacagcaaagagctgacaagagccctgttcgccgtgtgcagaggcgagttcagacagctgatggtgttcctgtacgaggcctgcaagatggccctgcagaacaacgatcacaccctgaacgagaaaaccctggccgaaaccttcgacaagctgggctgtgaacacctgagcagcaaccccttcaccatcaagtttaaagaaatccccattccggtgctgagcatccccagcagatacaaccccaacgctctggaagagaaggacgagatcatcgaccgggtgttcgagtacatctactga

SEQ ID NO: 332 - DNA, 1236 bp, Artificial Sequence
  Synthetic
atggccttcctgttcagccctaagagcctggcctttagcggcgagagcctggaaagctacctgctgagagtggtggccgagaacttcttcgacagctaccagcagctgtccctggccatcagagaggaactgcacgagctggattttgaggcccacggcgcctttccaatcgagctgaagagactgaacgtgtaccacgccaagcacaacagccacttccggatgagagccctgagcctgctggaatccctgctggatctgcctcctcacgagctgcagaaactggccctgctgcggagcaatagaagattcgtcggcggcatgagcgccgtgcacagaaacggaatcgacatccctctgagcttcatcagatgcgccgacaaggacggcatcgagagcgtgccaatctgccctcagtgtctgaaagagggcccctacatcagacaggcctggcacatcaagcccatcgaagtgtgcgccaaacacggctgcgagctgatcaatcactgccccgattgccagcagcctatcaactacatcgagaacgagagcatcacccactgcgcctgcggcttcgactttaccacagccagctctgtgaaggccgatagccaggctgtgctgctgagcagatccctgtttgatggcgacgccctgagcaacaaccctctgctgtttatgggcaccagcgtgacccacagattcgccgctctgatctggtatcagaagtgccacgccagaaacaccgagtgcatggcccatagagccgtgggctacttcgaggattggcccaccagcttctacagagaactggacgccgtgaccacaggcgccgaagccagactgatcgacctgttcaaccggaccagcttccggtccatctacggggagctgatcctggactcacagtgcctgctgcctgaggacaaggaccctcacttcatctatctggccctgatggagtacatcagcaagctggtcgagtctcaccccaagagcaagaaacccaacgtggccgacatgctggtcaccgtggctgaaattgccgtgctgctgtccaccacacacgaacaggtgtaccggctgtaccaggatggcgtgctgacagccggcatgagaagcaagatccggaccagaatcagccctcacatcggcgtgttctacctgcggcaagtgatcgagtacaagacctccttcggcaacgacaagcagggcatgtacctgagcgcttggtga

SEQ ID NO: 333 - DNA, 636 bp, Artificial Sequence
  Synthetic
atgtaccggcggaacctgagacacagcagagtgaagaacatcttcaagttcgtgtccagcaagatgaacaaggtgctgaccgtggaaagccggctggaattcgatacctgcttccacctggaatactccccagacatcagcttcatcgaggcccagcctgagggcttcatctaccccttccaagagaaacatctgccctacacacccgactttctgatcgtggacaagggcgagagaaagctgatcgaagtgaagcccttcaagaaaacacagagccccgagttccagcagcggttctctgccaaaaaagcccaggccgacaacttcgacatccctctgatcctggtcaccgagaagcagatcagagtgaaccccatcctgaacaacctgaagctgctgcacagatacagcggcttccagagcttcacccctctgcacctgagctttctgaagctggtcaagcggtacaaacagatcaaagtcaaggacttcatcaccagctgccacgtggaacagaacgtggccgtgaaaacagccctggctctgatcagctctggcatgctgcacaccaacctgagcgcccaagagatcagcctggacagcatcgtgtggtgctctggccacgaagagagctga

SEQ ID NO: 334 - DNA, 1848 bp, Artificial Sequence
  Synthetic
atgaagaaccacgacaagcccagcatcttcagcgacgagttcgagtgcgagaaccagatcgaggaaagcgagctggcctccaatgccgagtgtgccgtgtctagagatctggccagctatcccgacgccacacagaaagaagtgatgcggcggtactacttcatcgagtggatgcggaaagagctggctggcggctggacccagaagaacctggatcctctgctgaacagagccgccagagaactgcagctgaaggcccctaaatggcgcgctctggccaactggtggaagatctacagccagagcggcttcaagctgacctctctgatccctagacagaccgccggcaaccggcacctgaaagtgaagaacgagatggtgttcttcgacaaggccctggaaagatacctggtgcctgagaggccttctatcgccgccgtgtaccagtactacagcgacctgatcagaatcgagaatcagaacatcgtcgagaacaagattgaggccctgagctacaagggcttctacaaccggatcaagaagctgagcgcctacgacgtgaaggtggccaggcacggaaagtatctggccgacatggaattcaacagcatcgacgctcactaccccgccagcagagtgctggaaaaggtggaaatcgatcacacccctctggacctgatcctgctggacgacgagcacaacttccccatcggcagaccctacctgacactgctgatcgaccagttcagccggtgcatcatcggcttctacctgggcttcaaagagcccagctacttctccgtgatgaaggccctgctgaacgccatcaagcccaagaactacatcagcgagcagttccccagcatcgagaaagagtggtgctgcgagggcaagatggaaagcctggtggtggataacggcgccgagttctggtccaagagcctggaacagtcctgcctggaactgggcatccacatccagtacaaccccgtgcggaagccctggctgaaacccctggtggaacggatcttccggaccatcaacagcaagctgacaatcagcatccccggcaagaccttcagcaacatcctgcagagagaggactacgacagcaagaaagacgccgtgatgcggttctccatcttcaacgagatcctgcacaagtggatcatcgacgtgtaccaccacgagcctgacagcagaaagcggagcatcccttacctgaagtggcaagagggcatcaactacctgcctccaatcagctacagccccgaggacgaaaaacagctggccatcatcctgggcatcaaggccaaacggcagcacagaagaggcggaatccacattcacagcctgagatacgactctgagatcctggccgactgcagacggatgtaccctagcgtgacaagcgtgctgaccaagacaaaccccgacgacatctcctacatctacgtgttcatcgagcacgagcaaaagtacatcaaggtgccctgcgtggaccctatcggctacacaaagggcctgagcctgttccagcaccagatcaacctgaagctccagagagagtacatcgacaagaaaaccgacctggacagcctggccaaagtgcgcatgtacatcaacgaccggatcctgaaagagatcaacgatctgaagtcccggcagaagaaggccaccaagggcattagcagactggccaagcacgccagcatcggcagcgataagaaagagtctatcagcacaagccctctgctcaacgtgtccaaggacgccgatcagaccaagcctgtgcagcctaaaggcgacgactgggacgatctgatcagcgatctggacccctactga

SEQ ID NO: 335 - DNA, 1002 bp, Artificial Sequence
  Synthetic
atgcggagactgagcaagcagcaagagcaagccctgcgcgagtacatcggcgtgttcatcgagagccctatcgccaccaccatcatggacgacttcgagcggctgcggtacaacaaacacctcggcggagagcagcagtgtatgctgctgacaggcgatacaggcagcggcaagagcagactgatccaagagtacaagcagcggctgtgcagcgacagcaacgagagcagttttagcctgctggtgtctcggatccccagcaagcctagcctgcctagcacaatcatccagctgctgaaggacatgggccacttcggcagcacctacagaaagggcatcagcaacgaccagagcctgaccgagtctctgatccggtgcctgagaagcaagaacaccgagctgatcatcatcaacgagttccaagagctggtcgagttcaagtccggcaaggccctgaacgagatcgccaaccggctgaagtacatcagcgaagaggcccaggtgccaatcgtgctcgttggaatgccttgggccaagaagatcaccaccgaacctcagtgggccagcagactgctgatccagagagagctggaatacttcaagctgagcgacaagcccgagtacttcatcagattcgtgaagggcctgatcctgcggatgcccctggaacctagcgagaagctgttcaacaaggccgtgatcctgagcctgttcagcgtgtcccagggccagatcagaaagctgaagcacttcctggacgaagccctgaagctggccatgctggaagaacagagcgagatcacccctcacagcttcagcaagatcttcagcatgtggtatcccaaccagacgaaccccttcaagcagaaggccgaggaaatcatcgggcaagaagtgaagtcctacagctactacgactctggcgccgacaatgagttcgaggccatcattcccacacagtacaccgacaagctgaccctgagccagatcatcaagaaatga

SEQ ID NO: 336 - DNA, 1251 bp, Artificial Sequence
  Synthetic
atgctgaccctgaccaagagcatcctggtgttccgggtgtccatgttcctgctggaacccgccaagctgtacgtgaccgagagcctggaaagcttcctgatcagactgtgccaggccaacggcttcgagagctacagaatcatggccctggtcatcagagactggatgtacaacaacgacttcgagtctgccggcgcttggcctctggttctggaacaggccaatatcttccacgccaaccacagcagcggcttcagagtgcgggccttcaagctgctggatagcctgttcagcgacagcaccagcagcgtgctggaaagatgcctgctgaacagcgccacactgttcagccccaagatcagctccgtgtcctaccagaacgtgttcatccctcagctgttcatccggcggaagggcatccctgtgtgtcccgagtgcctgaaagagaacgcctgcattcctgtgctgtggcacgtggaaccctaccaagtgtgccaccaccaccagtgcgagctgattagccactgtcctagctgcaaccggcagctgaactacgtggaaagcgagcagatcaccaagtgcgagtgcggctacgacctgtgcttcatggaaaagctgcacagccagagcaacgccctgaagctgagccagtatatcgccggggagaaagtgaacggcctgcctgatggcctggacatctctgagagactgggcatcatcctgtggttctacaagagataccccaacgtgaacagctacgacgccaacgccatcgtggaatacttcagccagtggcctaacatctacatcgacgagctgaacgccatcagcgagcacgccatcgacagacagatcaagcccttcaaccacaccgacttcaacctgatcttcggcgacatcctgagcagctgcagaaagctgccctacagaaaccccgagcagaacatcatccagcaggccagcatcgactacctgatcaagctggtggaacagaaccccaagagcaagaccagcaacttcgccgacctgcggctgaatatcatcgaggtgtcaggcgtgctgagcaccagcgtggaacaggtgtacagactggtggaagagggctacctgcagctggccatccggctgaagatcagagagagactgcctccattcaagggcgccttctacctgcggcaagtgatcgagctgcggcagtctcaaacacccctgcctcagagcaagcagattacctacctgcctagctggtga

SEQ ID NO: 337 - DNA, 651 bp, Artificial Sequence
  Synthetic
atggttcgatggctgacccacatgtaccggcggaagctgaagcacagcagagtgaagaacctgcacaagttcgccagccagaagaacaagagcacctgtctggtggaaagcagcctggaattcgacgcctgcttccacttcgagttcagcccttctatcgccgcctttgaggctcagcctctgggctacgagtaccagttcgacaacctgatctgccggtacacccctgactttctgctgacacacaccgacggcacccagaaattcatcgaagtgaagccccagagcaagatcgccgacgaggacttcagagcccggttcatcgagaagcagacaatcgccaagcaggacggcagggacctgatcctggtcaccgacaagcagatccgggtgtaccccacactgaacaacctgaagctgctgcacagatacagcggcttccagagcctgacagagctgcaggcttctgtgctggaactggtcaagcagtacggctccatcaaagtgggccagctggtgtccttcctgaaagtgacagcaggcgagctgctggccacagtgctgagattgctgtctctgggacagctgttcgccgacctgaccaccaacgagatcagcatcgagacagccatctggtccaacaacgtgtga

SEQ ID NO: 338 - DNA, 1821 bp, Artificial Sequence
  Synthetic
atgttcaacgacggcctgttcgaggacgagttcaaccagcctctgcctaaggtggaaacaaagctgccccagaactacgccaaggacctgcaggccctgcctgagaagatcaagaccaccaccttcgccaagctgaagtacatccagtggctggaagccaacatccaaggcggctggacccagaagaacctggaacctctgctgaaagtgatgcccgaggtggaaggcgagaagaagccctcttggagaacagccgccagatggtacagcgcctacaccaacgccgacaagaacatcatggctctgatccccagccaccagaagaagggcaacagagagagagacaccgccaccgacaagttcttcgagaaggccctggaacgctacctggtcaaagaaaagcctagcgtggcctccgcctacaagtactacgccgacctggtcatcatcgagaacgacagcgttgtgggcagcgtgctgaagcccctgacctacaaggccttcaagaaccggatcgacaacctgcctcagtacgaagtgatgatcgccagatacggcaagcggctggccgatatcgccttcaacaaagtggaaggccacaccagacctaccagagtgctggaaaaagtggaaatcgatcacacccctctggacctgatcctgctggacgacgagctgcacattcctctgggcagacccacactgaccatgctggtggatgtgtacagccactgcatcgtgggctactactttagcttcagcgagcccagctacgacgccgtgcgtagagctatgctgaacgccatgaagcccaagaacgaggtggccaagagataccccgacaccatcaacgagtggaagtgcgccggcaagatcgagacactggtggtggataacggcgccgagttctggtccaactctctggaactggcctgcgaggaaatcggcatcaacacccagtacaaccccgtggccaagccttggctgaagcctttcgtggaacggatgttcggcaccatcaataccgagctgctggaccccattcctggcaagaccttcagcaacatcctgcagaagcacgagtacaatcccaagaaagacgccatcatgcggttcaccacctttatgcagctgttccacaaatgggtcgtcgacgtgtaccaccaggacgccgacagccggttcaagtacattcctagccagctgtgggaccagggcttcaataccctgcctcctaccgtgctgagcaacgacgatctgcagcagctggatgtggtgctgtccatcagctaccaccgggtgctgagaaaaggcggcattcagctggaaaacagctcctacgacagcaccgagctggccaactaccggaagcagttcagccacaaggtgtcccaagaggtgctgatcaagctgaaccccgacgacatctcctacatctacgtgtacctggacaagctcgagcactacatcaaggtgccctgcaaggaccaagagtacacccagggcctgagcctgaaccagcacaagatcaacatgcggatccaccgggacttcatcagcggcagcatcgacaatgtcggcctggccaaggccagaatgttcatccacaacaagatccagaacgagttcgaggaactgaagaacgcccctaagaacagcaaagtgaaaggcgggaaagccctggccaaacaccagaacgtgtccagcgacagccagaagtctatcgcccagagcgagcccgtggaacctaagaaagtgacccctaaagaacaagtgaccgacagctgggacgacttcatctccgacctggacggcttctga

SEQ ID NO: 339 - DNA, 1002 bp, Artificial Sequence
  Synthetic
atgctgaccgacaagcagaaagagaagctgaacgagttccgggacgtgttcatcgagtaccccatcatcaccaccgtgttcaacgacttcgaccggctgagactcggcaaaggactggccggcgagaagccttgcatgctgctgaatggcgataccggcacaggcaagacagccctgatcaagcagtacaaagagcggcatctgccccagttcatcaacggcgtgatgaatcaccccgtgctggtgtctcggatccccagcaatcctacactggaaagcacactggccgagctgctgaaggatctgggccaagtgggcagcaccgagagaaagctgagagtgaacggcaccagactgaccaccagcctgattaagtgcctgaaaacctgcggcaccgagctgatcatcatcgacgagttccaagagctgatcgagcacaaccagggcaagaagcggagagagatcgccaaccggctgaagtacatcaacgatgaggccggcgtgtccatcgtgctcgttggaatgccttgggccgagaagatcgccgatgagcctcagtggtctagcagactgcttgtgcggagacagctgccctacttcaagctgagcgagaaccccaagcacttcgtgcagctgattatcggcctggccaacagaatgcccttcaccgagaagccaagcctgtctgagcaggccacagtgttcgccctgttcagcctgagcaagggctgcttcagaaccctgaagtactttctggacgacgccgtgctgtacgccctgatggacaatgccaagacactgaccacaaagcacctggtcaaggccttcgacgtgctgttccccgatctggccaacctgtttacactgcccgtggccaagatcaccgccagcgaggtggaaagatacagcctgtacaagcccgagagcgcccaggacgaggatccctttatcaccaccaagttcaccgacaggatgcccatcagccagctgctgagaaagtga

SEQ ID NO: 340 - DNA, 1176 bp, Artificial Sequence
  Synthetic
atgcacttcctggtgcagaccaagccttatcctgacgaggccctggaaagctacctgctgagactggccagagacaacagctacgacggctacagagagctggccgacattctgtggcagtggctggccgaacaggaccacgaacttgaaggcgctctgcccctggaactgaacaaagtggacgtgtaccacgccagacaggccagcagcttcagaatcagagccctgaaactggtggcccagctggctgatgtgaacgccggcgatattctggaactggcctgcagaagaagcaacttcaagtttggcaacctggccgccgtgtccagaaacgagctgacaatcccactggaactgctgcggaccgactacatccctgtgtgcatcgagtgtctgagcgagagcagctacatccccttctactggcacctgaagccttacaaggcctgccacaagcacaagacccagctgaccacacactgcggcgagtgccacaacctgatcgactacagagccagcgaggccttcctggaatgttcctgtggctgcaagctgaccagcagcgagcagctgaacgacgccgacttcaagatcgcctttgctctggcctccagcaacagccagaaaatcgtgggcctgatcagttggttcgccaaagtgaagcagctggacgtgcgggatgccgatttcaacagagccttcgtggactacttcagcacctggcctgatagcttcaccgccgagctggatctgctgaccaacaacgccagactgaaacagctgaaccccttcaacaagaccaagttcaacagcgtgtacggcaacgtgatccgggatgcccagattgccgccacctccaacagaaagaacaaggtgctggacgagatcatcaactacttcgtggaactggtggacagcaaccccaaggctaagcaccccaacattgccgacctgctgctgtgcacatttgacgccgctgtgctgctgaacaccaccaccgaacaggtgtaccggctgcaccaagagggctttctgaactgcgcctatcctcagaagaaacacgaacagctgagagccgacagccacgtgttctacctgcggcaagtgatcgaactgcagcaggcctttgccgccgagaagcctcagaccaagaagcagtttatcgccccttggtga

SEQ ID NO: 341 - DNA, 636 bp, Artificial Sequence
  Synthetic
atgatcatgattcggcggaagctgaagcacagcagagtgaagaacctgtacaagttcgccagccagaagaacaaggccacctgtctggtggaaagcagcctggaattcgacgcctgcttccacttcgagtacagcagagagatcaagagcttcgaggcccagcctctgggctttgagtacgagttcgacggcaggatctgccggtacacccctgactttctgctgacccaccacgagaagccccaaaagtacattgaagtgaagcccttcagcaagatcgccaacagcgagttcagagccagattcgcccagaaacagctggtggccaaagagcagatcggcatcgagctgatcctggtcaccgacaagcagatccgggtgtaccccacactggacaacctgaagctgctgcacagatacagcggcttccagagcctgaccgaactgcagctgagcatcatccagctgctgaaccagtggcgcaagctgaccatccagaacctggtcaagaccctgaaggccagcatcggagagatcctggccagcgtgtacagactgctgtctctgggcagcgtgaacagcgacctgaataccgagctgacactggaaagcgtgatctgggccgatggcgtgtaa

SEQ ID NO: 342 - DNA, 1842 bp, Artificial Sequence
  Synthetic
atggaattcgaggacgagttcagcttcgaggaagcccctcagaagctggccaagaccgccaataccgaggaaagcaaccctcagcctcgcgacctggaaagcctgagcaaagaggtgcaagaggccacactggcccggctgaaatacgtgaagtggctgaagcagagactgatcggcggctggacccagaagaatctggctcctctgctggccgagatgcccgagtttgagggacaagagaagcccaagtggcggacagtggctggatggtacgccgactacatcaaggccgaagaggacatccacgctctgatccccaagcaccaccggaagggcaatagacaggccagaagcgacaccgacaagttcttcgagctggccctgaccagatacctgaccaaagaaatccccaacgtggccagcgctcaccggttctactgtgaccagatcgtgctggaaaacgagaaggtgctgggcgagcctctgaagcccctgacctacaaggccttcaagaaccggatcgacaacctgcctcagtacgaagtgatgctggaaagatacggcaagcggctggccgacatcgagtacaacaaagtgatgagccacaagcggcccaccagagtgctcgagagagtggaaatcgatcacacccctctggacctgatcctgctggacgatgagctggatgtgccactgggcagacctacactgaccctgctgatcgacgtgtacagccactgcgtcgtgggcttctacctgggctttcagagccctggctacgatgctgtgcggagagccattacacacgccatgaagcctaagatctacctcaagagcacataccccgaggtggtcaacgagtggccttgctgcggaaagatcgagacactggtggtggacaacggcgccgagttttggtgtcagagcctggaactggcctgcgaggaagtgggcatcaacatcagctacaaccccgtgggcaagccttggctgaaacccttcgtggaacagttcttcaagaccatcaacgagatgatgctgagcccatttcctggcaagaccttcagcaacatgctggccaggcacgactacaaccctaagaaggacgccatcctgagattcggcaccttcaccatgctgttccacaagtggatcgtggacgtgtaccaccagagcgccgatgccagattccggtacatcccttgcgaggactggaacaagggcttcgctgttctgcctcctgctcagctgacacagcaggacaccgataagctggacgtggtcatgtgcatggccaaagagaaaaccctgagaaaaggcggcatcaagaacctgcacatcaactacgacagcgacgagctgagcgtgtacagaaagcggtactgcgccaagaaatccatcaaagtgaaagtgaagatcaaccccgacgacctgagctacgtgtacgtctacctgaacgccctggaaaactatatcaaggtgcccagcatcgacctggacggctacacaatgggactgtctctcgtgcggcacaagatccacctgaagttccaccgggattacatccagggcaaagtggacctgctgggcctcgccaaagccagaagattcatcgacgagcgcgtgaaagaagaggcccggcagctgaagaacgtggtgtccaagaccaaagtgaccggcaccaaggccatggctagagcccagggcatcgacaacacccaagtgaagtccatcgtgacaatccccgaggccaagaaaaccgagccttctcctgccgacacaaaagtgaaaaaggacgtggaaaactgggacgacttcgtgtccgatctggaagccttctga

SEQ ID NO: 343 - DNA, 1014 bp, Artificial Sequence
  Synthetic
atgctgacccaggccaagaaggccaagctgaaccagttcaaggccgtgttcatcgagtacacaatccccaagaccatcatcaacgacttcgacaagctgcggctgcactacgatctggccggcgagaagccttgcatgatgctgtctggcgataccggctgtggcaagagcgccctgatcaagcactactacgacaacaaccctcctcacttcgccgacggccagagaaaagtgcctgtgctgctgagcagaatccccagcaatcccagcatcgagagcaccctgaaacagctgctgcacgacctgggacagttcggcgccaagtctagcaagagactgaagaacggcaacgagatcgccctggccgagtctctggttgagcagctgaagagaagcggcaccgagctgatcatcatcgacgagttccaagagctggtggaaaacaacctgggcaagaagcggcgggatatcgccaatcagttcaagtacatcaacgagaaggccggcatcagcatcgtgctcgtgggaatgccttggatcgagcagatcgccgatgagcctcagtggtccagccggatctttatcagacggttcatcccctacttccggatcagcaagaaagaggaactgcagctgttcatccgggtgctgaagggcttcgccaacagactgcctttcagcgacaagcccagattcgagaacctggacattgccctgagcctgttcgccatcagcaacggctgtctgcggaagctgaagaacttcctggacagcgctctgactgaggccctgattaccgatgccgtgacactgaacaagcactgcctgagcagcgccttcaaggcttggaggcccgagctggacaacgtgttcgagatgaacgtgaacgagatccagggctgcgaggtggaacagtacagcaccttcaagcctgacggccctcaggacgaggacccctttatcgatacccagttctgcaacaaggtgcccctggtgcagctgctgaagaagtga

SEQ ID NO: 344 - DNA, 1179 bp, Artificial Sequence
  Synthetic
atgcagttcctgagccaggccacaccttatcctgacgagacaatcgagagctacctgctgagactgtcccaggacaatggctacctgggcttcgccgacatggccgacattctgtgggattggctggtcacccaggaccacgaactggaaggcgctttcagcaacgagctgcagagcgtggacgtgtacaaggccagccagagcagcaactttagagtgcgggctctgagactggtggctcagcttgctggcgtggaagcctctgagctgctgaatctgtgctggctgagaagcaacacccagttcggcgtgatcaccgctgtggctagatctggactgctggtgcctagacagctgctgcgcaagagcaacatccctgtgtgcaccgagtgcctgaagcaagaggtgtacgtgccctacctgtggcacctgaaggtgtacaaagcctgccacaagcacaaccggcagctgaccaagatctgcagacagtgcaacaccgagatcgactacagagtgtccgaggccttcctggaatgcgaatgcggagccgccattaagcagggccctaaagcctctcaggccgacctgaaactggccagcgctctgacatctaccgccgatgccaaactcgtgggactgatggcctggttcagccagtggcagagcatcagcttcgacgacgacgagttcagcgagctgttcgtgtcctacttctccaacggcctgagcggattccaggacgagctgagcaatatcgccgagctggccaagattaagcagctgcggcccttcaatcacacccctttcaacgacgtgttcggcagcctgctgaaggactccaaactggcctgtgccggcagccagggctataatactgtgcagctggccatcattgcctttctgaccaagctggtggaacagaaccccaagaagaagcaccccaacctgtccgacctgctgatctccatgctggatgccgctgtgatcctgggcaccaacaccgaacaggtgttccggctgtacgaggaaggatttctggccgctgtgcagcctcctaagaagaacaccttcctgaagcctagcgacaacctgttctacctgcggcaagtgattgagctgcagcagagcttcgcccctagcatcagcaacaagccccagcagtttgtgcctccttggtga

SEQ ID NO: 345 - DNA, 630 bp, Artificial Sequence
  Synthetic
atgtacatccggaacctgcggaagccctctccaaacaagaacgtgttcaagttcgccagcaccaaagtgggcaacgtgatcatgtgcgagagcaccctggaattcaacgcctgcttccacaacgagtacaacgacctgatcgagagctacggctctcagcccgagggctttaagtacgagttcatgggcaagagcctgccttacacacccgacaccgtggtggtgtacaaggataagtgcgtgaagtaccacgagtataagtacgaaaccgagacagccgagcctctgttcagagagagattcagcgccaagagagccgcctgcctgaagatgggagtgcagctgatcctggtcaccgagaaccagatcaccaaaggactggccctgaacaacttcaagctgctgcacagatacagcggcgtgtacggcatcaagaacatccagagcgagatgctgaacttcatcaacaagagcggcgccatcaacctggtggacgtgaagtcccagttcaacctgagcatcggcgaggccagaagcttcctgtacgccctgcttcacaagggcctgctgaaagccgacctggaagatgacgacctgagcaacaaccccacactgtgggtcaccccttga

SEQ ID NO: 346 - DNA, 1854 bp, Artificial Sequence
  Synthetic
atgggctacaccatgaccgatttcttcgacgagttcaacgagtctctggcccctctgaagccccagacacctaccagatacctgaagctggacgacgccaacctgatcaagagagatctggacaccttcagcaacaccctgaagaacgaggccctgcagcggtacaagctgatcatcagcatcgacaagaagctgagcgccggctggacccagagaaacctggatcctatcctggacgagatcttcaaagaggacgagcaggccagacctaactggcggacagttgccagatggcggaagaagtacatcgagagcaacggcgatctggccagcctggtggtcaagaaccacaagatgggcaacagaaacaagcggatcgagggcgacgagagcttcttcgacaaggccctggaaagattcctggacgccaagaggcctacaatcgccaccgcctaccagtactacaaggacctgatcgtgatcgagaacgagagcatcgtggaaggcaagatccccatcatcagctacaccgccttcaacaagcgcatcaaggccattcctccatacgccgtggccgtggccagacacggaaagtttaaagccgaccagtggttcgcctactgcgccgctcatgtgcctccaaccaggattctggaacgcgtggaaatcgatcacacccctctggatctgatcctgctggacgatgagctgctgatccctatcggcagaccctacctgacactgctgatcgacgtgttcagcggctgcgtgctgggctttcacctgagctacaagagccccagctatgtgtctgccgccaaggctattgcccacgccatcaagcctaagagcctggatgccctgaacatccagctgcagaacgactggccttgcttcggcaagttcgagaacctggtggtggacaacggcgccgagttctggtccaagaatctggaacacgcctgtcagtccgccggcatcaacatccagtacaaccctgtgcggaagccctggctgaagcccttcatcgagagattctttggcgtgatgaaccagtacttcctgcctgaggtgcccggcaagaccttctccaacatcctggaaaaagaagagtacaagcccgagaaggacgccatcatgcggttcagcaccttcgtggaagagttccacagatggatcgtggacgtgtaccaccaggacagcaacagcagagagacacggatcccaatcaagcggtggcagcagggcttcgatgtgtaccctcctctgaccatgaacgaggaagatgaggcccggttcaccatgctgatgcggatcagcgacagcagaaccctgaccagaaacggcatcaagtaccaagagctgatgtacgacagcacagccctggccgactaccggaagcactaccctcagaccaaagagacactgaagaaactgatcaaggtggaccccgacgacatcagcaagatctacgtgtacctggaagaactcgagagctatctcgaggtgccctgcaccgatcctaccggctatacagatggcctgagcatctacgagcacaagaccatcaagaaagtcaaccgggaaaccatccgcgagagcaagaatagcctgggcctcgccaaagccagaatggccatccacgagagagtgaagcaagaacaagaggtgttcattgccagcaagaccaaggccaagatcaccgccgtgaagaagcaggcccagattgccgacgtgtccaataccggcaagggcaccatcaaggtgtccgaggaatctgccgctcctgtgcacaagaacatctccaacgacgccttcgacgactgggacgacgatctggaagccttcgagtga

SEQ ID NO: 347 - DNA, 1002 bp, Artificial Sequence
  Synthetic
atgaatgccctgaccgagatccagatcgagcagctgagaaacttcagcgactgcatcgtgatgcaccctcagatcaaggccatcttcaacgacttcgacgagctgcggctgaaccggaagttccagtctgatcagcagggaatgctgctgatcggcgatacaggcgtgggcaagagccacaccatcaaccactacaagaaacgcgtgctggccacacagaactacagccggaataccatgcctgtgctgatctcccggatctccagaggcaaaggcctggacgccacactgattcagatgctggccgacctggaactgttcggcagcagccagatgaagaagcggggctacaagaccgagctgaccaagaaactggtggaaagcctgattaaggcccaggtggaactgctgattatcaacgagttccaagagctgatcgagttcaagtccgtgcaagagcggcagcagatcgccaacggcctgaagttcatcagcgaagaggccaaggtgcccatcgtgctcgttggaatgccttgggccgccaagattgccgaggaacctcagtgggcctctagactcgtgcggaagcggaagctggaatactttagcctgaagaacgacagcaagtacttccggcagtacctgatgggcctcgtgaagcagatgcccttcgatgagcctcctaagctggaaagcaagcacaccacaatggccctgttcgccgcctgcagaggcgagaatagagccctgaaacatctgctgatggaagccctgaagctggccctgagctgcaacgagtacctggaaaacaaacactttatcgccgtgtacgagaagttcgacttcttcaatgacaaggacagcctgaagctcaagaaccccttcaagcaggacatcaaggatatcatcatctacgaagtcaccaagaacagcagctacaaccccaacgctctggaccccgaggatatgctgaccggcagaaagttcgccatcgtgaagtga

SEQ ID NO: 348 - DNA, 1230 bp, Artificial Sequence
  Synthetic
atggccttcctgttcagccctaaggccagagcctttagcgacgagagcctggaaagctacctgctgagagtggtgtccgagaacttcttcgacagctacgagggcctgagcctggccatcagagaggaactgcacgagctggattttgaggcccacggcgcctttccaatcgacctgaagagactgaacgtgtaccacgccaagcacaacagccacttccggatgagagccctgggcctgctggaaacactgctggacctgcctagatacgagctgcagaaactggccctgctgaagtccgacatcaagttcaacagcagcgccgctctgtacaagaacggcgtggacatccctcagaagttcatcagataccacaccgaggccgccgtggacagcattcctgtttgtcctcagtgcctggccgaggaagcctacatcaagcagagctggcacatcaaatgggtcgacgcctgcaccaagcaccagtgtactctggcccacaactgccctgagtgctgcgcccctatcaactacatcgagaacgagagcatcacccactgcagctgcggctttgaactgacctgggccagcacaagccctgtgaatgccctgtctatcgagcacctgaacaagctgctggacaagagcgagcggaacgacagccacagcctgttcaacaacaccacactgaccgagagattcgctgccctgctgtggtatcagggcagatacagccagaccgacaacttctgcctggacgacgccgtggattacttcagcatgtggcctgccgtgttctacaaagagctggacgagctgagcaagaacgccgagatgaagctgatcgacctgtttaacaagaccgagttcaagttcatcttcggcgacgccatcctggcctgtcctagcacacagatgcagagagagctgcacttcatctacagagccctgctggactacctggtcaccctggtggaaggcaatcccaaggccaagaagcccaacaccgccgatctgctggtgtctgtgctggaagctgctaccctgctgggcacatctgtggaacaggtgtaccggctgtaccaggacggcattctgcagaccgccttccggcacaagatgaaccagcggatcaacccctacaagggcgtgttcttcctgcggcacgccatcgagtacaagaccagcttcggcaacgacaaggcccggatgtatctgagcgcttggtga

SEQ ID NO: 349 - DNA, 690 bp, Artificial Sequence
  Synthetic
atgaccagcctgcctacacctagcgccatcacaacaagcgccctggaatacgcctttcacacccctgccagaaacctgaccaagagccggggcaagaacatccacagatacgtgtccgtgaagatgagcaagcggatcaccgtggaaagcacactggaatgcgacgcctgctaccacttcgacttcgagcctagcatcgtgcggttctgcgcccagcctatccggttcctgtactacctgaatggccagagccacagctacgtgcccgatttcctggtgcagttcgacaccaacgagttcgtgctgtacgaagtgaagtccgcctacgccaagaacaagcccgacttcgacgtggaatgggaagccaaagtgaaagccgccacagagctgggcctcgagctggaactggtggaagagagcgacatcagagacaccgtggtgctgaacaacctgaagcggatgcacagatatgccagcaaggacgagctgaacaatgtgcacaacagcctgctgaagatcatcaagtacaacggcgcccagagcgccagatgtctgggagaacaactgggcctgaagggcagaaccgtgctgcctatcctgtgcgacctgctgtctagatgcctgctggacaccagactggacaagcccctgagcctggaaagcagattcgagctggcctcctacggctga

SEQ ID NO: 350 - DNA, 1812 bp, Artificial Sequence
  Synthetic
atggccaagaagggcttcagcagcttccacagaaaggccgtgtccagccaggacaccctggaatccattgagctggtgtccagcgccaactgcctggaaagcgtgacctaccaggacatcagcgcctttccagagacaatcgccgtggaaatcaacttccggctgagcatcctgcggtttctggcccggaagtgcgagactatcgtggccaagtctatcgagccccacagagtggaactgcagcagaactactcccggaagatccccagcgccatcaccatctacaggtggtggctggccttcagaaagagcgactacaaccccatctctctggcccctaacatcaaggaccggggcaacagagaaacaaaggtgtccaccgtggtggactccatcatggaacaggccgtcgagagagtgatcagcggccggaaagtgaatgtgtcctccgcctacaagcgcgtgcggagaaaagtgcggcagtacaatctgacccacggcaccaagtacacataccctaagtacgagagcgtgcgcaagcgggtcaagaagaaaacccctttcgagctgctggccgctggcaagggcgaaagagtggccaagcgcgagttcagacggatgggcaagaagatcctgaccagcagcgtgctggaacgggtcgagatcgatcacacagtggtggacctgttcgccgtgcacgaagagtacagaatccctctgggcagaccctggctgacccagctggtggattgctactctaaggccgtgatcggcttctacctgggcttcgagcctcctagctacgtgtcagtgtcactggccctgaagaacgccatccagagaaaggacgacctgatcagcagctacgagagcatcgagaacgagtggctgtgctacggcatccccgatctgctcgtgaccgacaacggcaaagagttcctgagcaaggccttcgaccaggcctgtgaaagcctgctgattaacgtgcaccagaacaaggtggaaacccctgacaacaagccccacgtggaacggaactacggcaccatcaataccagcctgctggacgatctgcccggcaagagctttagccagtacctgcagagagaaggctacgacagcgtgggcgaagccacactgaccctgaacgagatcagagagatctacctgatttggctggtggacatctaccacaagaagcccaaccagcggggcaccaactgtcctaatgtggcctggaagaaaggctgccaagagtgggagcccgaggaattcagcggcagcaaggacgagctggacttcaagttcgccatcgtggactacaagcagctgaccaaagtgggcatcaccgtgtacaaagagctgagctacagcaacgaccggctggccgagtacagaggcaagaaaggcaaccacaaggtgcagttcaagtacaaccccgagtgcatggccgtgatttgggtgctcgacgaggacatgaacgagtacttcaccgtgaatgccatcgactacgagtacgccagcagagtgtctctgtggcagcacaagtacaatatgaagtaccaggccgagctgaacagcgccgagtacgatgaggacaaagagatcgacgccgagatcaagatcgaggaaatcgccgaccggtccatcgtcaagaccaacaagatcagagccaggcggagaggcgccagacaccaagagaattctgccagagccaagagcatcagcaacgccaatcctgccagcatccagaagcacgaggacgagatcgtgtccgccgacaacgacgactgggacatcgattacgtgtga

SEQ ID NO: 351 - DNA, 993 bp, Artificial Sequence
  Synthetic
atgagcgagacaagagaggccagaatcagcagagccaagcgggcctttgtgtctacacctagcgtgcggaagatcctgagctacatggacagatgccgggacctgagcgacctggaatctgagcctacctgcatgatggtgtacggcgcttctggcgtgggcaagaccaccgtgatcaagaagtacctgaaccagaatcggagagagagcgaggctggcggcgatatcattcccgtgctgcacatcgagctgcccgacaatgccaagcctgttgacgccgctagagaactgctggtggaaatgggcgatcccctggctctgtacgagacagacctggccagactgaccaagagactgaccgagctgattcctgccgtgggcgtgaagctgatcatcatcgacgagttccagcacctggtggaagaacggtccaaccgggtgctgacccaagtcggcaattggctgaagatgatcctgaacaagaccaagtgtcccatcgtgatcttcggcatgccctacagcaaggtggtgctgcaggccaattctcagctgcacggccggttcagtattcaggtggaactgcggcccttcagctaccaaggtggaagaggcgtgttcaagaccttcctggaatacctggacaaggccctgcctttcgagaagcaggccggactggccaatgagagcctgcagaagaagctgtacgccttcagccagggcaacatgcggagcctgagaaacctgatctaccaggccagcatcgaggccatcgacaaccagcacgagacaatcaccgaagaggacttcgtgttcgccagcaagctgaccagcggcgacaagcccaacagctggaagaaccctttcgaagagggcgtcgaagtgaccgaggacatgctcagacctccacctaaggacatcggctgggaagattacctgcggcacagcacccctagagtgtccaagcctggccggaacaagaacttcttcgagtga

SEQ ID NO: 352 - DNA, 1185 bp, Artificial Sequence
  Synthetic
atgttcctgcagcggcccaagccttactccgacgagagcctggaaagcttcttcatcagagtggccaacaagaacggctacggcgacgtgcacagatttctggaagccaccaagcggtttctgcaggacatcgaccacaacggctaccagacattccccaccgacatcacccggatcaacccctacagcgccaagaatagcagcagcgccagaaccgccagctttctgaaactggcccagctgaccttcaacgagcctcctgaactgctgggcctcgccatcaaccggaccaacatgaagtacagccctagcaccagcgccgtcgttagaggcgctgaagtgttccctagaagcctgctgcggacccacagcatcccttgctgtcctctgtgcctgagagagaatggctacgccagctacctgtggcacttccaaggctacgagtactgccacagccacaacgtgcccctgatcaccacatgcagctgcggcaaagaattcgactacagagtgtccggcctgaagggcatctgctgcaagtgcaaagagcccatcacactgaccagcagagagaacggacacgaggccgcctgtaccgtgtctaattggctggccggacatgagagcaagcccctgcctaatctgcccaagagctacagatggggcctcgtgcattggtggatgggcatcaaggacagcgagttcgaccacttcagcttcgtgcagttcttcagcaactggccccggtccttccactccatcatcgaggacgaggtggaattcaacctggaacacgccgtggtgtccaccagcgagctgagactgaaagacctgctgggcagactgttcttcggcagcatcagactgcccgagagaaacctgcagcacaacatcatcctgggcgagctgctgtgctacctggaaaacagactgtggcaggacaagggcctgatcgccaacctgaagatgaacgccctggaagctaccgtgatgctgaactgcagcctggaccagatcgccagcatggtggaacagcggatcctgaagcctaaccggaagtccaagcctaacagccctctggacgtgaccgactacctgttccacttcggcgacatcttttgcctgtggctggctgagttccagagcgacgagttcaaccgcagcttctacgtgtcccggtggtga

SEQ ID NO: 353 - DNA, 633 bp, Artificial Sequence
  Synthetic
atgtacaagcggaacctgaagcacagcagagtgaagaacctgttcaagttcgtgtccgccaagatgaacagcgtgctgctggtggaaggcagcctggaattcgatacctgcttccacctggaatactccccacacatccagagcttcgaggcccagcctgtgggcttcttctaccagtacctgaaccgggactgcccctacacacccgacttcaagatcatcgagaagggcgtgatcaagtacatcgaagtgaagccctgggagaaaaccctgaaagaggacttcctgctgcggttccctgccaagcagcagaaagctgccgagctgggaatcaccctggtgctgatcaccgagaagcagattagagtgaaccccgtgctgaacaacctgaaggccctgcacagatacagcggcttccagtccttcacacccctgcacaccctgtttctgagcctggtgcagagactgggcagagtgtccatcaatgaggccgccaaacagctgatgatcgagcggcccctgatcctgaaaacagccctgagcctgatcagcagcggcgtgatctctgccaacctggtcaatgaggaactgggcctgaactccgtcgtgtggtccaagagctacgagagctga

SEQ ID NO: 354 - DNA, 1869 bp, Artificial Sequence
  Synthetic
atgagccacgagaaagaagtgggcgttttcggcgacgagttccagaccgtgatcgagttcgacaagcacagcgagggcagcctgtctacacacggcaccgtgaatagagatctggccagctacagcaccgagatccagagcgaagtgatgcggcggtacagattcatcgagtggatccggaagagagtgaaaggcggctggaccgagaagaacctgaacagcctgattcggcaggccgccatcgagctgaaactggaacctcctagctgcagaacactggcccggtggtggaagagatacagcgaggccaacttcagcctgatgagcctgctgcctaacaacagcaacaagggcaacagaaagcagaaggtggccaacgacagcgtgttcttcgagcgggccatcgagagatacctggtgcctgagaggccttctatcgccgccgtgtacgagtactacagcgacctgatcagaatcgagaaccagagcctggtggacggcaagatcaagcccgtgtcctacaagggcttctacaacagagtgaagaagctgcccgcctacgaggtggtgctggctagacacggaaagtaccaggccgacatggaattcaacaagatcgacgcccacatgcctccaagcagagtgctggaaaaggtggaaatcgatcacacccctctggacctgatcctgctggacgatgagctgaagctgcctatcggcagaccctacctgacactgctgatcgaccagtacagcaagagcatcatcggcttccacctgggctacaaccagcctagctactactccgtgatgaaggccatcctgaacgccatcaagcccaaggactacgtgaaagagcgctaccccagcatcgagcacgactggtattgccagggcaagatggaaaccctggtggtggacaacggccctgagttttggggcggatctctggaacaggcctgcctggaagtgggcatcaacatccagttcaaccccgtgcggaagccctggctgaaagctctggtggaacggatcttccggaccatcagcagcaagctgctggtcaacatccccggcaagaccttcagcaacatcatggaaagagccggctacgaccccaccaaggatagcgtgatgaccttctccgtgttcgacgagctgttccacaaatgggtcatcgacgtgtaccactacgagacagacacccggaagcggctgatccctcacctgaaatggcaagagggcgtgtccatgatgccacctatcagctaccagcctgaggacctggaaaagctgagcgtgatcctgggactgcaggccttcagaaagcacagaagaggcggcatccatctgcacggcctgagatacgacagccaggatttcgccgcctaccggcggatgaaccctagagacacagtgatcctgaccaagacagaccccgacgacatcagctccatctatgtgtacctggaaagagagcggcactacctgaaggtgccctgcatcgatcctatcggctacaccaagggcctgagcctggacaaccacctgaagtttaagctgctgtaccgggactacatcagccggcacacagatctggatggcctggccaaagccagaatctacatccacgagcggatcgtgcgggaaaccgaggaactgaaccagctgcacagaagcagacccaagagaaccacaggcggcatggccagactggctaagcacaatggcgtgcggagcgattccgatgcctcttgtgttcctgaggctctgcccgctctgaatgtgaaagaacagaaaaaccctcagaaggccctgcctgacagcgacgagtgggacgactttatctccaagctggacccctactga

SEQ ID NO: 355 - DNA, 1014 bp, Artificial Sequence
  Synthetic
atgttctctctgagccccgagaacgagttcaagtaccagatgttcgtggacgtgttcgtcgagctgcctatcgccaccaccgtgatgaacgacttcgaccggctgcggtacaacagaaagttcggcggcgatcagcagtgcatgctgctgacaggcgatacaggcagcggcaagagcttcctgatccaagagtactgcagacgggtgctgcagaccagccagaatcctgctgctgtgctgagcagcagaatccccagcaagcccacactggaaagcaccatcatcgagctgctgaaggacctgggccagtttggcgccgtgtacagaaagggcaagagcaaggatcagagcctgaccgagagcctgctgagaagcctgaagtccaagaacaccgagctgatcatcatcaacgagttccaagagctggtcgagttccagtccggcagagccctgtctgagatcgccacacggctgaagtacatcagcgaagaggccaccgtgcctatcgtgctcgttggaatgccttgggccgccaagattgccgaggaacctcagtggtctagccggctgctgatcagaagagagctgctgtactttaagctgagccaagagcctgagcagttcatcagattcgtgaagggcctgctgaagcggatgcccttcaatgaagcccctcagctggacggcaagcagatgattctggccctgtttagcgccagccacggccagattagaaggctgaagcagatcctgaacctggccgtgcagcaggcattggccgaagaggctagcaccgtgaatcagcaccatgtggccagcgtgttcggcatgctgttccctagtaccaagaatcccttcctgctgtccgccaaagagatcgagggaaccgaagtggccgtgcctagccactatgatgtgggcgccgagaatgagtttgacgctgtgatccccacacagtacaccgacctgctgcctctgagtcagctgctgcggaagtccagaaagaccaagtga

SEQ ID NO: 356 - DNA, 1224 bp, Artificial Sequence
  Synthetic
atgttcctgatcacccctgacaagcagtacgccgacgagagcctggaaagcttcctgattagagtgtgcgagtgcaacggcttcgagagcttccaactgctgtctggcgttctgtgggcctggctggtggaaaatgatcatcaggctgctggcgccctgcctagaaagctgagccagatcaatctgtaccacgccaagcacagcagcggctttagagtgcgggctatccagctgctggactccctgtttggcggcgacatcaagcctctgatgggacacgctgtgctgcactccagcgtgaccttttctcctggactggccgccgtgttcagagatggactgcacatccccagatgctttctgagcagccagtgcgtgccagtgtgctctcagtgtctggccgagcagacctacatccggcagttctggcacctgattccttaccaggcctgccatctgcacggcgtgaagatgctgtaccagtgtcctgagtgtcagcagcccctgaactaccaagagagcgagcagatcagcctgtgcgcctgtggctttgagctgagcaaggtggtcacaaagcaggccagctgtgacctggtggccatcagcaagctgatcgtgtccggcgaccacgagggcaacagagatagcagcatctctcactggctgggagccctgctgtggttcagcagaaggcagaagtctagccccaagcgggacgtgatggacgagagcatgctgtctgaggccgtggacttcttcagcagatggcctgtggccatggtggaagaactggaccagattgtgcagggcgctgccctgaagctgacaaagaactacaaccacaccaagttcagcgacgtgttcggcgatctgctgaccgccacaagaaagctgcctagctccgacctgcaccggaacttcgtgctgaaaaccatcgtggactacctggaacagctcgtgcggagcaaccccaagaaaggcgaggacaatatcgccgatctgcagctgagcatcctggaagcctctgctctgctgagcagcagcaccgaacaggtgtaccggctgtacgaagagggctacctgcagtgcagcaagagactgaagctgcacagcaaactgagcagcgacgatgccgtgttctacctgcggcagatcatcgaactgcggagagccggaatcgccagcgactacagcaccaacacagtgtacctgccaagctggtga

SEQ ID NO: 357 - DNA, 690 bp, Artificial Sequence
  Synthetic
atgagcagcctgagactgcctagcgccatcacaatcagcgccctggaacaggccttcgacacccctgccagaaacctgacaaagagccggggcaagaacatccacagattcaccagcgccaagatgggcaagagaatcagcgtggaaagcaccctggaatgcgacgcctgctaccacttcgacttcgagcctagcatcgtgcggttctgcgcccagcctatcagactgagctacttcatcaacggcaagcaccatacctacgtgcccgacttcctggtgcagttcgatacccacgagttcgtgctgtacgaagtgaagtccgactacgccaagaacaagagcgacttcggcagcgagtgggaagccaaagtgcaggccgcttctgccctgggagttgagctggaacttgtgggcgagagcgacatccgggacaaagtgatcctgaagaacctgaagctgatgcacagatacgccagcagagccgacctgaacaacgtgcagaagtccctgctgagcaccctgaaacaggatggcgcccagacagccaagtgtctgggagaacagctgggcctgaagggcagaaccatcctgcctatcctgtgcgacctgctgtccagatgcctgctggacaccagactggacatgcccctgagcctggaaagccagtttgagctgggcagctacgcctga

SEQ ID NO: 358 - DNA, 1659 bp, Artificial Sequence
  Synthetic
atgcccaagaccttcagcagcttccacagaaagagcgtgcccagcgagctgaagcccgaagtgaacaaggccgtgatcagagccagcagcctggaagatgtgacctaccaggacatcagcgcctttccagagaagatcagcaccgagatcaccttccggctgaatatcctgcggttcctgggcagaaagtgcgagagaatcgtgcccaagagcatcgagccccacagaatcgagctgcagagaaaccacgtgcggaagatccctagcgccatcaccatctacaggtggtggctggccttcagagagagcgactacaaccccacatctctggcccctgacttcaaaggcagaggcaaccgggataccaaggtgtccacaatcgtggacgccatcatggaacaggccgtggaaagagtgatcagcggccggaagatcaacgtgaacagcgcccacaagcgcgtgcggagaaaagtgcggcagtacaacctgaagcacggcaccaagtacaagtaccctaagtacgagagcgtccggaagcgcgtgaagaagaaaaccccttacgaactgctggccgccaaaaagggcgagagagtggccaagcgcgagttcagaagaatgggcaagagaatcctgaccagcagcgtgctggaacgcgtggaaatcgatcacaccgtggtggacctgttcgccgtgcacaaagagcacagaatccctctgggcagaccctggctgacacagctggtggattgctacagcaaagccgtgatcggcttctacctgggcttcgagcctcctagctacgtgtcagtgtcactggccctgaagaacgccatccagagaaaggacgacctggtgtccagctacgagtccatcgagaacgagtggctgtgctacggcatccccgatctgctcgtgaccgacaacggcaaagagttcctgagcaaggccttcgacaaggcctgcgagtctctgctgatcgtggtgcatcagaacaaggtggaaacccctgacaacaagccccacgtggaacggaactacggcaccatcaataccagcctgctggacgatctgcccggaaaggccttcagccagtacctggaaagagaaggctacgacagcgtgaacgaggccacactgaccctggacgagatcaaagagatctacctgatctggctggtggacatctaccacaccaagcctaacaagcggggcaccaactgtcccaacgtggcatggaaaaggggctgccaagagtgggagcccgaagagtttagcggcacaaaggatgagctggacttcaagttcgccattgccgaccacaagcagctgaacaaaggcggcatcacattctgcaacggcctggtgtacagcagcgagaggctggccgagtacagaggcaagaaaggcaaccacaaagtgaagttcaagtacaaccccgagtgcatggccgtgatttgggtgctcgacgaggaagaacacgagtacttcaccgtgcctgccatcgactacgagtacgccagcggagtttctctgtggcagcacaagtacaatatgaagcaccaggctgagctgaactccgccgactacgacgaggacaaagaaatcgacgccgagctgcggatcgaggaaatcgccgatcagagcatcgtgaagaactga

SEQ ID NO: 359 - DNA, 765 bp, Artificial Sequence
  Synthetic
atggacaaggaccgggaagtgcggatcagcaaggccaagaaagccttcgtgtctacccctagcgtgaaaaccgtgctgcggtacatggacagatgccgggatctgagcgacctggatagcgagcctacctgcatgatggtgtttggagccacaggcgtgggcaagaccaccatcatcaagaaatacctgatgcagaacaagcgggacagcgacgccaagggcgatatgattcctgtgctgcacatcgagctgcccgacaacgccaaacctgtggatgccgctagagaactgctgctggaaatgggcgatcccctggctctgtacgagacagacctggccagactgaccaagaagctgaccgatctgatccctgccgtgggcgtcagactgatcatcatcgacgagttccagcacctggtggaagagaagtccaaccgggtgctgacccaagtcggcaactggctgaagatgatcctgaacaagaccaagtgtcccatcgtgctgttcggcatgccctacagcaaagtggtgctgcaggccaactctcagctgcacggcagattcagcatccagttcgagctgcggcccttcagctacgaggaaggcaacggcgttttcaagaccttcctggaatacctggacagagccctgcctttcgagaaagaagccggactggccagagagagcctgaccaaaaagaccatctgcctgttcagccggaagcacgccttcatcgagaagcccaacctgagcagcatctactga

SEQ ID NO: 360 - DNA, 651 bp, Artificial Sequence
  Synthetic
atgaccgacaagaaaaccatcagcaccaagagcagcaacaacaaccacaaggccaccagcaccgtgtctagctggctggccggaaataccagcaaggtgctgcccaatctgccccagagctatagatggggactcgtgcactggtggtgccacatcagcgacaacaagttcgagcacttcagcttcgtgcagttcttcagcaactggcccagcagcttccacagcatgatcgacagcgagatcgagttcaacctggaacacgccatcgtgggcagaaagggcctgagagtgaaggacctgctgggcagaatcttcttcaacagcgtgcggctgcccgagagaaacctgcagcataacatcgtgctgcaagagctgctgcggcacatcgagacacacctgtgggacaacaatggcctgctggccaacctgagaatgaacgccctggaagccgccgtgttcctgaactgcaacatcgatgaggtggccagcatggtggaacagcggatcctgaagcctagcagaaagaccaagcctaacacacccctggccgtgaacaactacctgttctacttcggcgacatcttctgcctgtggctggctgagttccagaccgacgagttcaatcggagcttctacgtgtcccggtggtga

SEQ ID NO: 361 - DNA, 633 bp, Artificial Sequence
  Synthetic
atgtaccggcggaagctgaagcacagcagagtgaagaacctgttcaagttcgccagccagaagaacaaggccacctgtctggtggaaagcgccctggaattcgacgcctgcttccacttcgagtacagccctgccatcgtggcctttgaagctcagcccctgggctttaagtacgacttcgagggcagaacatgcccctacacacccgactttctgctgacccactctgacggcacccagaagtacatcgagatcaagcccgtgaaagagctggccaaggacgagttccggcagagattcgagctgaaacagctggctagcaagcagctgggcatcgagctgatcctggtcaccgacaagcagatcagagtgttccccgtgctggacaacctgaagctgctgcacagatacagcggcttccaggtgctgaccgagctgcacacagtggtcgtgggactcgtgaagtctaccggcctggtcaaagtggcccagctggtcaactacctgaaggtgtcagctggcgaggtgctgtctatcgtggccagactgctgtgtatcggacagctggccaccgacctgacaacagatgccctgagcctggactctgtgatctgggcctctgacgagcagtga

SEQ ID NO: 362 - DNA, 1839 bp, Artificial Sequence
  Synthetic
atgaacagcaagagcctgggcctgttcgacgacgagtttcagcaccccattcctcaggtggaagcccctaagagcaccaaggccgagaaggacctgagcgcctatcctcaagagatccagcagaccacctacgccagactgaagtacatccggtggctgaaagagcggatcgtcggcggatggaccgagaagaatctggcccctctgatcaacgagatgcccaaggtggaaggcgccgacaagcccaattggagaacagccgccagatggttcaagagctacagcgagagcgacgagagcatcttcgctctgatccccaagcaccagaagaagggcaagagaacccagcggaccgacaccgacaagttcttcgagaaggccctggaacggttcctggtcaaagagaggcctagcgtcagcagcgcctaccagtactacaaggacctggtggtcatcgagaacgagaaagtgatcggcgaggacctgcggcctctgacctacaaggccttcaagaaccggatcgacaagctgccccactacgaggtgctgagagccagatacggaaagcggattgccgacctggcctacaacaaagtggaaagccacaagcggcccaccagagtgctggaacgagtggaagtggatcacacccctctggacctgatcctgctggacgacgagctgcagattcctctgggcagacccacactgaccatcctgatcgacgtgtacagccactgcatcgtgggcttctacctgggcttcaacgagcccagctacgacgccattagacgggccatgctgaacgccatgaagcccaagaactggatcaaagagcagtaccccgacatcacccacgactggccttgctgcggaaagatcgagacactggtggtggacaacggcgtggaattctggtccaacagcttcgagagcgcctgcgctcagatcggcatcagcctgcagtataaccccgtgggcaagccctggctgaagcccttcgtggaaagaatcttcggcgtgatcaacacccagctgctggaccctattcctggcaagaccttcagcaacatgatgaagaaagagggctacgaccccaacaaggacgccatcatgagattcagcgccttcatggaagtgttccaccactggatcatcgacgtctaccaccaagaggccgacagccggttcagctacatccctgctctggaatgggaccggggctacaatcaactgcctcctgctcctctgagcagcgacgacatccagagactggaaatcgtgctgggcatcagcacctggcggcacatcagaaaaggcggcatccacttcgagaacctgagatacgacagcaacgagctggccgactaccggaagaggtttagccctaaggccagcgtgaagctgctgctgaaagtgaaccccgaggatctgagccgggtgtacgcctttctgcctgagctggaccactacattgaggtgctgtgcatcgaccccaatggctacacagccggactgtctctgcaccagcacaaagtgaatgtgcggctgcagcgggacttcatcggcagccatatggatgtggccgctctggccagggccagaatgctgatccacgagaagatccagagcgaggtggaactgctggccaactccaccagaaagcccaaagtgcgcggaggaaaggcactggccaagtaccagaatgtggccagcgacaacctggtgtccgtgaagccttctccacctaccaagaaactgcctaacaaggtcgagacagaggaagcccagaacaaaggcgactgggacgacttcgtgtccgacctggaaggcttctga

SEQ ID NO: 363 - DNA, 1005 bp, Artificial Sequence
  Synthetic
atgctgagcgagatccagacacagcggctgaacgagttcatcgacgtgttcatcgagtaccctctgatgaagaccatcctgaacgacttcgagcggctgagagccggacaaaaactggccggcgagaagcagtgtatgctgctgacaggcgataccggctgtggcaagagcagcgtgatcaaccactacaagaacaagcaccccgcctgccacatcgacggtgtctatcatcaccccgtgctggtgtctcggatcccctctagacctacactggaaagcacaatcgcccagctgctgtccgatctgggacaagtgggagccgccaagcggaagctgaagagaaacgacgccaacctgaccgacagcctgatcgccaatctgaagtcctgtggcaccgagctgatcatcatcaacgagttccaagagctggtggaaagcaaccagggcaagaagcggaacgagatcgccaaccggctgaagtacctgaacgaggaagccggcattcccatcgtgcttgtgggcatgccttgggccgaacagattgccgaagaaccccagtggtccagcagactgatgatccgcagattcatcccctacttcaagctgtccgaggacgtgaccctgttcgtgcgagtgctgatgggacttgccgccagaatgcccttcagagagaagcccagaatccagcagcaggacatcgtgtacgccctgttcgccgtgtccaagggctgcttcagaaccctgaagcacttcctgaatgaggccgtgaagcaggccctgatgtgtggatctgaggccctgacaaagcagcacctgtctgccgccttcgaggtgttctatcccggcatcgaggaccctttcaagctgagcgtggacgagatcacagcctgcgaggtggaacactacagcgtgtaccacaccgacagctccagcgacaacgaggcccacaatcctaccagattcaccgagagagtggccatttctcagctgctgaagaggaactga

SEQ ID NO: 364 - DNA, 1179 bp, Artificial Sequence
  Synthetic
atgcacttcatcgtgcagaccaagcctttcaaggacgagacactggaaagctacctgctgcggctgaccagagacaacgcctacgccgattatcacgagctggccgacatcatctggcagagcctggtggaatgcgaccacgaactggaaggcgctttccctctggacctgaaaaccgccaatctgtaccacgccagccagagcagcagattcagagtgcgggcctttaagctggtggcccaatgggctgctcttgccccactggaactgatcagactgagctggctgcggagcaacacccagtttggacatctgacagccctgatccgggaccagctgctgatccctagaatgctgctgcgcgagaactacgtgcccatctgcagcgagtgcctgaaagaagagagctacttcccctactactggcacctgaagccttacaaggcctgccacaagcacaaggtccagctgcagtctcactgtgccgagtgtggcgagctgatcgactacagagccagcgagcagttcagccagtgtagctgtggggccaagctgaaaacaatggcccctgcctctgaggccgatatcgccgtttctgaaggactgtctggcgccgatgctcaccactgggttggaaagctggcttggtttgcctaccagtacggccacgatcaagagcacgccagcttcaacgaggccttcatcagctacttcaagcactggcccgacaatttcttcgccgagctggacgagaaggtgttccgggccagagagaaacagctgcggcccttcaaccacaccaagttcgatagcgtgttcggcgacgtgatcaaagtgggcaaagtggccgctcctaacgtgctgagaagcaacttcgtggtggacagcctgctgtcctacttcagcgatctggtggaaaagaaccccaagcagaagcaccccaatatcgccgacctgctgctgaacagcctggactttgctaccctgctgggcaccacactggaacaggtgttcagactgtaccaagagggccagctgacctgttgcgagcggctgaacaagaacgagcgcctgcagcctgacagatgcgtgttctacctgagacaggtggtggaactggcccagagccagggcagatatgtgggcgacttcaagaaccagctgatcaccccttggtga

SEQ ID NO: 365 - DNA, 624 bp, Artificial Sequence
  Synthetic
atgtacgtgcggaacctgagaaagcccagcgccaccaagaacgtgtacaagttcgccagcagcaagaaccggaacgtgatcctgtgcgagagcagcctggaacgggattgctgttaccacctggaatactccaaggacgtgttcagcttccagtctcagcccgagggcttctactacagcagcggcaacaagcggtgcccctacacacccgattttctcgtgcggaatcaggacggcagcgagtactacctggaagtgaagcctctggccaagaccttcagcgaggacttcaagcacagcttcgccctgaagagaatcgccgctcagcaccagggaaagccactggtgctggtcaccgacaagcagatcagaaacggcgtgtacctggaaaacctgaacctgatccacagatacggcggcctggtggactttagcctgagcagcacacggatcgtggaagaactgtctgccgccggacggatgtgcatcagaagcctggccgacaacctgaagctgagcatcggagaagtgatcgccgtggtgttcagactcgttggcctgggcagagtgaacgtgccactggactctgccatcaacgagatgagcgtgatcagcgtgaactga

SEQ ID NO: 366 - DNA, 1914 bp, Artificial Sequence
  Synthetic
atggtcatccccttcgacgacgagttcgagttcatcaccgacgacacccaggccgagtacgatagcacatctgaggccaagctggcccggaagcagtacctgcctctggatagcgtgaccatccacgagagaggcctgagcagcttcagcgaggaacagaagaacaaggccctggaacggtacaagctgatctccgccgtggccaaagagatcagcggaggctggacccctaagaacatcaaccctctgatcgacaagtacagccccaacctgagcatcaagcggcccagctacaagagcgtgatccggtggtacaagagcttctgcgagaacgacggcaacatcgtgtgcctggtggaccacaaccacagcaagggcaaccgcaccaagcggattatcgacgatgaggccttcttcgtggaagccaccgagagatttctggacgccaagaggcccaactacagccaggcctaccagttctactgcgaccggatcgagatcgagaacagcaacatcatcagcggccagatcagcaaggtgtcctaccaggccttcaaagagcggctgaagaagctgcctccttacgaggtggccctgaagagattcggccccaattacgccaacaagctgttcaactactaccagagcagcgtgcggaccagccggatcctggaaagagtggaaatcgatcacacccctctggacctgatcctgctggacgacgatctgctgatccctctgggcagagcctacctgacactgctggtggatgtgttcagcggctgcatcatcggcttccacctgggcttcaaccctccaagctatgtgtctgtggccaaggccatcatccacagcgtgaagtccaaggactacgtgcacgacctgaacatcgagctgaccaacgactggctgtgccacggcaagatggaaaccctggtggtggataacggcgccgagttctggtccaagtctctggatcaggcctgcatggaagccggcatccactacgagtactgcaaagtgggacagccctgggagaagcctagagtggaacggaagttcctggaaatcatccagggcatcgtcggctgggtgcccggaaagaccttctccaacattctggaaaaggaccgctacgaccctcagaaagacgccgtgatgcggttcagcagctttgtggaagaactgcaccggtggatcatcgacgtgcacaacgcctctccagacagccggaacacaaagatccccaactaccactggaagaagtccgaggaagccctgcctcctgccgctctgtctgatagagatgagaagcagttccggatcatcatgggcgtgatccacgagggcgtcgtgaccacaaagggcatcaagtacaagcacctgatgtacgacaacgtggccctcgagcagtacagaaagcagtatccccagaccaaagagagccggaagaaaaccatcaagatcgaccccgacgacctgtccagcatcttcgtgtacctggaagagatcgatggctacatcgaggtgccctgcaaatacgatcccctgggctacaccaagaacctgagcctgtctgaacacgtgcggatcaccaagatccaccgcgacttcatcaaaggccaggtggacgcactgagcctggccaaagctagacaggccctgcacgagagaatcaagaccgagcaagagcacctgtctctgatgagcgtggaaagcagagccaagaaggccaagcacggaaagaagatggctgccctgagcggcatcagcaacgagcagcctatgagcatccagaacgccctggaaaacaagaacaaacccctggacgacaacctggacgagcccacacctgtggacaacctgaagtccctgtggaacaagcggaaggccatgaagcggagcaaagagtga

SEQ ID NO: 367 - DNA, 987 bp, Artificial Sequence
  Synthetic
atgaacctgagcgccaagcaagagatcgccgtggatgagctgctgacccagtaccacaacagcttcgtgatctaccccgacgtgcagcagatcttcgacggcctggattggatcgtgcggagaagccagttcggcaacttcacccctagcatgctgatcaccggtggaacaggcgccggaaagaccagcctgatcaaccactacgtgaagtaccacttcaacgacaacgaggtcctgatcaccagagtgcggcccagcttcatcgagacactgatctgggctatcgacaagctgggcatcccctacaacaccagaagcaagcggagcgagatcggcctgcaggactacttcatcaacagcgtgaagaagtccaacctgaagctgctggtcatcgaggaagcccaagagctgttcgagtgcgctagccccaaagagcggcagaagatccgggacagactgaagatgatcagcgacgagtgcagactgcccatcgtgttcatcggcatccctaccgccaagctgatcctggaagatagccagtgggacagacggatcatggtcaagagagagctgccctacatccggatcaccagcgagtctagcctggacgtgtacatcgacctgctggaagaactggaaaagcagctgcctatcagcgtgcagcccgacctgagcgagatggatatcgccatgagactgctgtccgccaccaagggaatgctgggcgccatcaaagaactcgtgggctacgctctggaactggccctgctgtctggaaagagcgccatcaccaacgacgagttcgccctgggcttcgagagaatcaacggccccgatgtgacaaaccccttcaccaccgagctggaaaaactgctggtgccccaagtgatcgagtacgagggcttcatcatcgaccccgagaacggcgagatcaagttcaccaagcagattttcaaggacatccctctggccgctctgctgggataa

SEQ ID NO: 368 - DNA, 1206 bp, Artificial Sequence
  Synthetic
atggacatccagctgtaccccgacgagagcctggaaagcttcctgctgagactgagccaagagcagggctacgagcggttctctcacttcgccgaggacatttggttcgacaccatggaacagcacgaggccattgccggcgctttccctctggaactgaaccggatcaacatctatcacgcccagaccaccagccagatgagagtgcgggtgctgatccacctggaaaaccagctgaagctgaacaacttcggcgccctgagactggccctgtctcactctaaagcccagttcagccccgagtacaaggccgtgcatagactgggcagcgactacccctttgtgttcctggccaagcggtttacccctatctgccctctgtgcatcagcgaggccccttacatcagacagcagtggcagttcctgagccagcaggcttgtgaaagacacggctgcaagctggtgcacctgtgtcctgagtgtcagagccggctggaataccagacaaccgagagcatcagccagtgcgagtgtggcttcgagctgagaaacagccccgtggaagatgcccctgtggctgttctgctggtggccagatggctgagcggcaacgattctaagcctctgggactgctgaaggccgagatgaccctgagcgagagatacggctttctgctttggtacgtgaaccgctacggcgacatcgagaacatcagcttcgagagcttcgtggaatactgcagctgctggcccagagtgctgaaagaggaactggacgagctggtcaacaaggccgacctgatcagaatcaaggactggaagaaaaccttcttcaacgaggtgttcggagccctcctgaaggactgcagacagctgccttctcggcagctggaaagaaacagcgtgctgactcaggtgctggcctacttcaccaagctgatggccacactgcccagcagcagcaagggcaatgtgggagatgtgctgctgagcccactggaagtgtctaccctgctgagctgcaccaccgatgaggtgtaccggctgtacgagttcggcgagatcaaggccgccatcagacccagaatgcacaccaagatcgccagccacgagagcgccttcacactgagaagcgtgatcgagacaaagctgacccggatgtgcagcgagaacgatggcctgtctgtgtacctgcctgagtggtga

SEQ ID NO: 369 - DNA, 636 bp, Artificial Sequence
  Synthetic
atgatcatgattcggcggaagctgaagcacagcagagtgaagaacctgtacaagttcgccagccagaagatcaacgccacctgtctggtggaaagcagcctggaattcgacgcctgcttccacttcgagtacagcagagagatcaagaccttcgaggcccagcctctgggctttgagtacgagttcgagggcagaatctgccggtacacccctgactttctgatcacccacgacgagaactcccagaagttcatcgagatcaagccctacagcaagatcgctaaccccgagttcagagccagattcgcccagaagcagctgatcgccaaagagcagatcggcatcgagctgatcctggtcaccgacaagcagatctgtgtgtaccccgctctggacaacctgaagctgctgcacagatacagcggcttccagagcctgaccgatctgcagctgagcatcatccagctgctgagccagtggcgcaagctgaccattcaggatctcgtgcggacactgaaggccagcattggagaagtgctggcctccgtgtacagactgctgtctctgggcagcgtgaacagcgacctgaataccgagctgacactggaaagcgtgatctgggccgacgaagtgtga

SEQ ID NO: 370 - DNA, 1842 bp, Artificial Sequence
  Synthetic
atgaagttcgaggacgagttcagcttcgaggaagcccctcagaagctggccgagacagccaagcctgaggaacacaagtaccaggaccgcgacctggaaagcctgcctaaagaggtgcaagaggccacactggcccggctgaaatacgtgaagtggctgaagcagagactgatcggcggctggacccagaaaaacctggttcctctgctggccgaaatgcccgagtttcagggccaagagaagcccaagtggcggacagttgccggatggcacagcggctatatcaaggccgaagaggacatccacgctctgatccccaagtaccaccggaagggcaacagaaagcccagaaccgacaccgacaagttcttcgagctggccctgaccagatacctgaccaaagaaatccccaacgtggccagcgctcaccggttctactgtgaccagatcgtgctggaaaacgacaaggtgctgggcgagcctctgaagcccctgacctacaaggccttcaagaaccggatcgacaacctgcctcagtacgaagtgatgctggaaagatacggcaagcggctggccgacatcgagtacagcaaagtgatgagccacaagcggcccaccagagtgctcgagagagtggaaatcgatcacacccctctggacctgatcctgctggacgatgagctggatgtgccactgggcagacctacactgaccctgctgatcgacgtgtacagccactgcgtcgtgggcttctacctgggcttccagtctccttgctacgacgctgtgcggagagccatctctcacgccatgaagcctaagagctacctcaagagcatctaccccgagatcgtgaacgagtggctgtgctgcggcaagatcgagacactggtggtggataacggcgccgagttctggtgtcagagcctggaactggcctgcgaggaagtgggcatcaacatcagctacaaccccgtgggcaagccctggctgaaacccttcgtggaacagttcttcaagaccatcaacgagatgatgctgagcagcttccccggcaagaccttcagcaacatgctggccagacacgactacaaccctaagaaggacgccatcctgagattcggcaccttcaccatgctgttccacaagtggatcgtggacgtgtaccacaagacccctgacgccagattccggtacatcccctacgaggactggaacaagggcttcgctttgctgcctcctgctcagctgaccgagcaggacatcgataagctggacgtggtcatgtgcatggccaaagagaaaaccctgcggaaaggcggcatcaagaacctgcacatcaactacgacagcgacgagctgagcctgtacagaaagcagtacagcagcaagaagtccatcaaagtcaaagtgaagatcaaccccgacgacctgagctacctgtacgtgtacctggacgccctggaacactacatcaaggtgcccagcatcgaccctgagggctacacaatgggcctgagcctgatccggcacaagatccacctgaagtttcacaaggactacatccagggcaaagtggaactgctgggcctcgccaaggccagacagttcatcgacgaacgcgtgaaagaagaggcccggcagctgaagaatgtgggcagcaagatcaaagtgaccggcaccaaggccattgccagagtgcagggcatcgacaacacccaagtgaagtctatcgccaagacacccgagacaaagcaggccgaacctacaccagccgacaccaagccaaaagaggacgaaggcagctgggacgacttcatcagcgatctggacggctactga

SEQ ID NO: 371 - DNA, 1002 bp, Artificial Sequence
  Synthetic
atgctgaccgaccagcagaaagagcggctgaacgagttcagaaacgtgttcatcgagtaccccatcatcaccaccgtgttcaacgacttcgaccggctgagactcggcaaaggactggccggcgagaagccttgcatgctgctgaatggcgataccggcacaggcaagacagccctgatcaagcagtacaaagagagacatctgccccagttcatcaacggcgtggtcaatcaccccgtgctggtgtctagaatccccagcaatcccacactggaaagcaccctggccgagctgctgaaggatctgggacaagtgggcagcaccgagcggaagctgagaatgaatggcaccagactgaccagcagcctgattaagtgcctgaaaacctgcggcaccgagctgatcatcatcgacgagttccaagagctgatcgagcacaaccagggcaagaagcggagagagatcgccaaccggctgaagtacatcaacgatgaggccggcgtgtccatcgtgctcgttggaatgccttgggccgagaagatcgccgatgagcctcagtggtctagcagactgcttgtgcggagacagctgccctacttcaagctgagcgagaaccccaagcacttcgtgcagctgattatcggcctggccaacagaatgcccttcaccgagaagcccaacctgagcgaacaggccacagtgttcgccctgttcagcctgagcaagggctgcttcagaaccctgaagtactttctggacgacgccgtgctgtacgccctgatcgacaatgccaagacactgacagcccagcacctggtcaaggccttcgaggtgctgttccccgacgtgtccaacctgtttaccctgcctgtgtccgagatcaccgccagcgaggtggaaagatacagcctgtacaagcccgagagcgaccaggacgaggacccttttatcgccaccaagttcaccgacaggatgcccatcagccagctgctcaagaagtga

SEQ ID NO: 372 - DNA, 1176 bp, Artificial Sequence
  Synthetic
atgcacttcctggtgcagaccaagccttttccagacgaggccctggaaagctacctgctgagactggcccggaacaacagctaccacggctattctgagctggccgacatcctgtggcagtggctggctgaacaggaccacgaacttgaaggcgccctgcctctggaactgaacaaagtggacgtgtaccacgccagacaggccagcagcttcagaatcagagccctgaaactggtggcccagctggctgatgtgaacgccggcgatattctggaactcgcctgcagaagaagcaacttcaagtttggcaacctggccgccgtgtccagaaacgagctgacaatcccactggaactgctgcggaccgagaacatccctgtgtgcatcgagtgtctgagcgagagcagctacatccccttctactggcacctgaagccttacaaggcctgccacaagcacaagacccagctgaccacacagtgcggcgagtgccacaacctgatcgactacagagcctctgaggccctgctggaatgtggctgtagctgcaagctgacctgcagcgagcagctgaacgacgccgacttcaagatcgccagcgctctggtgtccaacaacagccagaagattgccggcctgatcagttggttcgccaaagtgaagcagctggacgtgggcgacgctgatttcaacagagccttcgtggactacttcagcacctggcctgatggctttaccgccgagctggatctgctgaccaacaacgctcggctgaaacagctgaaccctctgaacaagacaaagctgaacagcgtgtacgccgacctgatccgggatgctcagagagccgccaccagcaacagaaagaacatcgtgctggacgagatcatcaactacttcgtggaactggtggacagcaaccccaagagcaagcaccccaacattgccgacctgctgctgtgcacctttgacacagccgtgctgctgaacaccaccaccgaacaggtgtaccggctgcaccaagagggctttctgaactgcgcctatcctcagaagaaacacgaacagctgcgggccgacagccacgtgttctatctgagacaggtgttcgagctgcagcaggcctttgccgctgaaagaccccagaccaagaagcagtttatcgccccttggtga

SEQ ID NO: 373 - DNA, 738 bp, Artificial Sequence
  Synthetic
atgagcgtgctgagcagcccatcaccttctccaagtccaagtccatcaccaagtccatctccatctccaagcaccgccgctctgatcgccctggaatctgcctttgtgacccctgccagaaacctgaccaagagccggggcaagaacatccacagatacgtgtccgccaagatgggcaagcgcgtgaccgtggaaagcttcctggaatgcgccgcctgctaccacttcgacttcgagccttctatcgtgcggttctgcagccagcctatccggttcagctactgcctgaacggcaagacccatacctacgtgcccgacttcctggtgcagttcgataccggcgagttcaagctgtacgaagtgaagtccgacatggaaagcagcaaagaggaattccagtgcgagtgggaagccaaggtgcagggcgcctttgaactgggactcgagctggaactggtcaccgaggaagagatcctggacgaagtgatcttcagcaacctgaagctgctgcaccgctacgccagcagagacaacctgaaccacttccaccagacactgctggccaccttcaagctgaatggcacccagacagccaagtctctgggacaccacctgggcctgaatggccggaagatcctgcctttcctgtgcgacctgctgagccggaatctgctgcagacaagcctggaaacccctctgtctctggaaagcgagttcgagcttgtgtgccacgcctga

SEQ ID NO: 374 - DNA, 1815 bp, Artificial Sequence
  Synthetic
atgcccaagaacagcttcagcagcttccacagaaagagcgccttccagcaggacaagctggaaagcaacgacagagtggtggtggacatcaacgacgtggacgaggccacctaccaggacatcagcgcctttccagacaacctggccacacagatcaccttccggctgagcatcctgagatacctggccagcaagtgcgagcagatcatccccaagaccatcgagcctcacagagtggccctgcagagactgcacgacagaaacatccccagcagcatcagcatctaccggtggtggctggtgttcagagccagcgactgtaaccctgcctctctggcccctaagaacaaggacaagggcaacagcaaagtgaaggtgcccatcttcgtggacgctctgctggaacaggccgtggaaagagtgatcagcggccggaaagtgcgcatcagatccgcctataagagagtgcggcggaagctgagacagcacaacctgaacaacggcaccgagtacaagtaccccacctacgagagcctgcgcaagagagtgaagaagaaaacccctttcgagctgctggccgccaagaaaggcgagagagtggccaagcgcgagttcagaagaatgggcaagaagatcctgaccagctacgtgctggaacgcgtggaaatcgaccacaccgtggtggatctgttcgccgtgcacgaggaacacagagtgcctcttggtagaccctggctgacccagctggtggactgttacagcaagaccgtgatcggcttctacctgggcttcgagcctcctagctacgtgtcagtgtcactggccctgaagaacgccatcctgaggaaggacgatctgctgagcagcttcgactccgtgcagaacgagtggctgtgctacggcatccctgatctgctggtcaccgacaacggcaaagagttcctgagcaaggccttcgacaaggcctgcgagtccctgctgatcaacgtgcaccagaacagagtggaaacccctgacaacaagccccacgtggaacggaactacggcaccatcaataccagcctgctggacgacctgcctggcaaagcctttagccagtatctgcagcgcgagggctacgactctgtgggagaagctaccctgacactggacgagatcaaagagatctacctgatctggctcgtggacatctaccacaagaactccaaccagcggggcaccaactgtcccaatgtggcttggaagaggggctgccaagagtgggagcctgaagagtttaccggcagcaaggatgagctggacttcaagttcgccatcgtggaccacaagcagctgacaaaggctggcgtgaccgtgtacaaagaactggtgtacagcagcgagaggctggccgagtacagaggcaaaaagggcaaccacaaggtgcagctgaagtacaaccccgagtgcatggccgtgatctgggtgctcgacgaggacctgaacgagtacttcaccgtgaatgccatcgactacgtgtacgccagcagggtgtcactgtggcagcacaagtacaacatgaagtaccaggccgagctgaacagcgccgagtacgatgaggacaaagagattgacgccgagatcaagatcgaggaaatcgccgaccggtccatcgtcaagacaaagaagattcgggccagaagaagaggcgccagacaccaagagaatagcgccagagccaagagcatcagcgacgccaaacctgtgcctagccagaagcacgaggacgagattgtggtggtcgacaacgaggactgggacatcgattatgtgtga

SEQ ID NO: 375 - DNA, 993 bp, Artificial Sequence
  Synthetic
atgaacgagacaagagaggcccggatcagcaaggccaagagggcctttgtgtctacccctagcgtgaccaagatcctgtgctacatggaccggtgcagggacctgagcgatttcgagtctgagcctacctgcatgatggtgtacggcgcttctggcgtgggcaagaccaccatcatccggaagtacctgagccagaacaagcgggactctgaagtcggcggcgacatcattcctgtgctgcacatcgagctgcccgacaacgccaaacctgttgacgccgctagagaactgctggtggaaatgggcgatcccctggctctgtacgagacagacctggccagactgaccaagaagctgatcgatctgatccctctcgtgggcgtgaagctgattatcatcgacgagttccagcacctggtggaagaacggtccaaccgggtgctgacccaagtcggcaattggctgaagatgatcctgaacaagaccaagtgtcccatcgtgctgttcggcatgccctacagcaaagtggtgctgcaggccaactctcagctgcacggcagattcagcatccagttcgagctgcggcccttcagctaccaaggcggaaatggcgtgttcaagaccttcctggaatacctggacaaggccctgcctttcgagaagcaggccggactggccaatgagagcctgcagaagaagctgtacgccttcagccagggcaacatgcggagcctgagaaacctgatctaccaggccagcatcgaggccatcgacaatcagcacgccagcatcaccgaagaggacttcgtgttcgccagcaagctgaccagcggcgacaagcctatcagctggaagaaccccttcgacgagggcgtgaaagtgaccgaggatatgctgcggcctcctccaaaggatatcggctgggaagattacctgcggaacaccacacacaagatccggaacagcggcgtgaagaacaacttcttcgactga

SEQ ID NO: 376 - DNA, 1185 bp, Artificial Sequence
  Synthetic
atgctgctgcagaggcctaaacctcaggccgacgagagcctggaaagctacctgatcagagtggccaacaacaacggctacgagaatatcaaccggttcctggtggccctgaagcactacctgtgccacatcgacagcaagcggttcaccacctttccaaccgacatccggcagatcaaccccagcagcagccagagatctagcgctgccagatctcacgccctgcagtacatcagccagctgacctttaccgagacagccgacctgctgagactggctatcagcagaagccctctgaagttcagccccagcaccacctctgtgattagagccggcgagatcctgcctaagagcctgatccggaccaagcacatcccctgctgtagcagctgtctgatcgagcagggctacgccaattacctgtggcacttcgagggctacgactgctgccacatccaccagaagctgctgaccttcagatgcgagtgcggcgagccctacgactacagaatcaatggcctgagcctgcagtgcagctcctgcggcacaacaatcacccagagcaagaacgagcccgagatcgactccctggaaatctctctgtggctggccggcgaaaccatcaagtggctgcctgaactgcccgccagctacagatggggaacaatccattggtggatgcggaaccagaacaccgaggtgctggaaacctgcagcttctccaccttttggagacagtggcccgagagcttccacaacctgattgagcagaccctgagccacaatcaagagtacagtctgcaggcccctcaagagtggcggctgaaggatctgattggcgagctgctgttcggcgccatcaacctgcctcggagaaatctgcagtataacctgatcctgcgcgagctgttctactacctggaatcccacctgtgggagaacaacggcctgatcgccaacctgaagctgaacgcccttgaagccgctctggtgctgaactgcgatatcgagcagctggcctccatggtggaacagggactgctggtggccatgcggcatcagaaacacgatgagcccctgagctacacaaactacctgtttcacttcggcgacatcttttgcctgtggctcgccgagttccagaccgacgagttcaaccggtccttctacaccagccggtggtga

SEQ ID NO: 377 - DNA, 648 bp, Artificial Sequence
  Synthetic
atgtacagacggcacctgaagcacagcagagtgaagaacctgttcaagttcgtgtccgccaagatgaataccgtgttcaccgtggaaagcgccctggaattcgatacctgcttccacctggaatactccccaagcgtgaagttctacgaggcccagcctgagggcttctactacgagtttgccggcagacagtgcccctacacacccgactttagactggtggaccagaacgacagcgtgtccttcctggaaatcaagcccagcaacaaggtggccgagcctgacttcctgcacagattccctctgaagcagcagcgggccatcgagctgtctagccctctgaaactggtcaccgagaagcagatcagaatcgaccccatcctgggcaacctgaagctgctgcatagatacagcggcttccagagcttcacccctctgcacatgcagctgctgggactcgtgcagaagctgggcagagtctctctgctgagactgagcgactccatcgacgcccctccagaagaagtgctggcctctgctctgagcctgatcgccagaggcatcatgcagagcgacctgaccgtgcaagagatcggcatcagcacactcgtgtgggcctctggccactctggaatcgatcacggatga

SEQ ID NO: 378 - DNA, 1872 bp, Artificial Sequence
  Synthetic
atggacgagcacaacggcctgttcgaggacgagttcgtgatccctcagcctagcgccagcacaagccctatcgatgccattcaggctgtggtgcctgccaccgtggatagctttcccgatgctctgaaggtggaagccctgcacagacgggactacatcctgtgggtcgagaagaatctggctggcggctggaccgaaaagaacctggctcctctgctggccgatgctgctctggttctgcctcctcctattcctaactggcggacccttgccagatggcggaagatctacatccagcacggcagaaccctggtgtctctgatccctaagcaccaggccaagggcaacagcagaagcagactgcctccaagcgacgagctgttcttcgagcaagccgtgcaccggtatctcgtgggagagcagccttctatcgccagcgcctttcagctgtactccgacagcatcctgatcgccaatctgggcgtcgtggaaaacagcatcaagaccatcagctacatggccttctacaaccgcgtgaagaagctgcccgcctaccaagtgatgaagtcccggaagggcagctatatcgccaacgtggaattcaaggccatcggcagccacaagccacctagccggatcatggaaagagtggaaatcgatcacacccctctggacctgctgctgctggacgatgatctgctggtccctctgggcagacctagcctgacactgctgatcgatgcctacagccactgcgtcgtgggcttcaacctgaacttcaaccagcctagctacgagagcgtgcggaatgccctgctgtccagcatctccaagaaagactacgtgaagaacaagtaccccagcatcgagcacgagtggccctgttacggaaagcccgaaacactggtggtggacaacggcgtggaattttggagcgcctctctggcccaggcctgtctggaactgggcatcaacatccagtacaaccccgtgcggaagccttggctgaagcccatgatcgagcggatgttcggcatcatcaaccggaagctgctggaacccattcctagcaagaccttctccaacatccaagagaagggcgactacgaccctcagaaagacgccgtgatgcggttcagcaccttcctggaaatcttccaccactgggtcatcgacgtgtaccactacgagcccgatagccggtgccggtacatccctatcatctcttggcagcacggctccaagaacgtgccaccagctcctatcatcggcgacgacctgaccaagctggaagtgatcctgagcctgtctctgcagtgcacccatagaagaggcggcatccagtgccaccacctgagatacgattccgatgagctggcctactaccggatgaactacagcgacaagacccggggcaagagaaaggtgctggtcaagctgaaccccagagacatctcctacgtgtacgtgttcctggacgagatcggcagctacatcagagtgccctgcatcgaccctatcggctacacaaagggactgagcctgcaagagcaccagatcaacgtgaagctgcaccgcgatttcatcaacgagcagatggacgtggtgtccctgagcaaggccagaacctacctgaacgaccggatcaagaacgaactggtggaagtgcggcacaacctgcggcagagaaatgtgaagggcgtgaacaagatcgccaagtaccggaacgtgggcagccacgccgagacatctattgtgcacgagctgaacatcagcgccaccaacgacgtgatcagcaagatggaaaacgcctctcagcccgagcactacgacgactgggataagttcaccagcggcctggaaccttactga

SEQ ID NO: 379 - DNA, 1008 bp, Artificial Sequence
  Synthetic
atggaactgagctgcgacgacgccaacaagctgcggagcttcatcgagtgctacgtggaaacccctctgctgcggaccatccaagaggacttcgaccggctgcggttcaacaagcagtttgccggcgagcctcagtgcatgctgctgacaggcgatacaggcacaggcaagtctagcctgatccggtactacgccgccaagtatcctgagcaagtgcggcacggcttcatccacaagcctctgctggtgtctcggatccccagcagacctacactggaaagcacaatggtggaactgctgaaggacctgggccagtttggcagcagcgagagaatccacaagagcagcgccgagtctctgacagaggccctgatcaagtgcctgaagagatgcgagacagagctgatcatcatcgacgagttccaagagctgattgagaacaagacccgcgagaagcggaaccagatcgccaaccggctgaagtacatcagcgagacagccaagattcccatcgtgctcgtgggaatgccctgggccattaagatcgccgaggaacctcagtggtccagcagactgctgatcagacgggctatcccctacttcaagctgagcgacgacagagagaacttcatccggctgatcatgggactcgccaacagaatgcccttcgagacacaagtccggctggaaacaaagcacaccatctacgccctgttcgccgcctgttacggatctctgagagccctgaaacagctgctggacgagtctgtgaaacaggctctggccgtgcacgccgagacactgaagcacgaacatatcgccgtggcctatggcgtgttctaccccgaccaagtgaacccattcctgcagcctatcgatgagatccaggcctgcgaagtgaagcagtacagcagatacgagatcgacgccgtgggcaaagaggaaatcctgtctcctctgcagttcaccgacaagctgcccatcagccagctgctgaagaagcggtaa

SEQ ID NO: 380 - DNA, 1233 bp, Artificial Sequence
  Synthetic
atgcatctgctgatcagacccgatcctagcctggacgagagcctggaaagctacttcctgcggctgagccaagagaacggcttcgagcggttctacctgttcagcggcgtgatcaaggactggctgcacaccacagatcatgccgccgctggcgcttttcccctggaactgtttcggctgaacatcttccacgccagcagatcctctggcctgagagttagagcactgcagctggtggacagactgacagatggcgcccctttcagactgctgcaactggccctgtctcacagcgccatcagcttcggcaatcaccacaaggccgtgcacagatccggcgtggacatccctctgtgctttatccggaccagcaagatcccttgctgccccgactgtctgagagaaagcgcttacgtgcggcagtgctggcacttcaagccttacgtggcctgccacagacatggcggcagactgatcgatagctgtcctgcctgtggcgagtccctgaattacctggccagcgagctgatcaactactgccagtgcggcttcgacctgagaaccgcctctacagttcccgctcagcccgatgagattcagctgtctgccctggcctacggctgcagctttgagagcagtaatcccctgctggccatcggctgtctgagcgctagatttggagccctgctgtggtatcagcagagatacctgagcgatcacgaggccgtgtgcgacgatagagtgctggccaaagccatcggccactttgccgcttggcctgatgccttttggggagagctgcagcagatggtggatgatgcccttgtgcggcagaccaaagagctgaaccacaccgacttcgtggacgtgttcggctctgtggtggccgattgtcggagaatccccatgagaaacaccggccagaacttcatcctgaaggacctgatcgtgttcctgaccgacctggtggtgtctcaccctcagtgcagagtggccaatgtgggcgatctgctgctgagcgcactggattctgccacactgctgagcaccagcatcgagcaagttcgcagactgcagcacgagggctttctgcctctggccattagacccgcctccagaaataccgtgtctcctcaccgggccgtgttccacctgagacatgtggtggaactgcggcaggccagaatgcagagccaccacgatgacagcagcacctatctgcctgcctggtga

SEQ ID NO: 381 - DNA, 624 bp, Artificial Sequence
  Synthetic
atgtacaaccggaacctgcggaagccctctccaaacaagaacatctacaagttcgtgtcccggaagaaccggtccaccgtgatgtgtgaaagcggcctggaattcgacgcctgcttccacctcgagttcagcccttctatcgccagcttcgagagccagcctaccggcattgagtaccccgccgataacaaagtgcggcggtacacccctgacttcaagatcgtgaaggacaccggcgagatcgagtacatcgaagtgaagcccgagcggatccacagcaccaagaagttcagggacgagttcgagcacaagagggccgcctattctgccctgggcttcaagctgatcctggtgtccgagaagcagatcagaagcgacaagctgctgagcaacctgaagatcctgcaccggtacagcagcaccaacctgagcgagctgcacaagctggccctgacacacatccagaagttcaagagcctgagcatccggcagctggccatcaagctgggcatcctgatctgcgactgtatcgccgcttgtgccctgctgatcggaatcggagccatcaaggccgacctggaaagcgacttcctgtgcgagaacagcctgctgaacgaggcctaa

SEQ ID NO: 382 - DNA, 1806 bp, Artificial Sequence
  Synthetic
atgttcgacgacgagttcgacgataaccctctgagagaggacgcccagagcagcagcgatcagcctgacgagatcagctttctggaccccgacctggacagctaccccagcaatagcagaatcgaggccattgccagatacgagctgatcctgttcatcagagagcggctggctggcggctggacccagagaaatatcgaccctctgaccgacgagtacttcagcgagaacagagagatcaacaagcccaactggcggaccgtgaccagatggcacaagaagctgctggaacagggcgacacccctaaggctctgatcgagcggcaccacaacaagggcaacagaaaccggaagctggaactggaacacgagcggtacttcgaggccgccatcgacagatttctgaaggccgaaagacccagcgtggccagcgcctacagattctacaaggaccagtgtctgctgcagggccagaacatcaaccccatgagccagagagccttctacgaccggatcgacaagctgaacttctacgaggtggccgtgaagagattcggcaagtacaaggccgacattatgtacggctacaagggcagcaccatcagacccgagcgagtgatgcagagagtggaaatcgatcacacccctctggacatcatcctgctggacgacgagacaagccagcctatcggcagaccctacctgacactgctgaaggacgtgtacagcggctgtctcgtgggctaccacctgacctttaaggcccctagctatgcctctgtggccaaggccatttgccacgccatccagcctaagaaccagagctttgaggcctggggcgtcgtgtggccttgttacggaaagatcgaggtgctggtggtggacaacggcgccgagttttggagcaagagcctggaacagatgtgctacgagctgggcatcaacgtgcagtacaaccccgtgcggaagccctggctgaagccctttatcgagcggagcttccggaccatcaatgacctgatcctgattgagctgcccggcaagaccttccggtccatcgataccagggacgagtacaatgccgtggaacacgccagcatcaagttcaaccggttcatccacggcttcgagaagtggatggccgaggtgtacaactgcagcgccgatagcagaggcctgaaggtgccaagcgtgaagtggcaagagggcatcgagacaatgcctccagccacactgaacgacgatgagatcagcgagctgcctaagctggccggcctgaaagagtctagagccatccagtctagcggcatcacctaccactacctgagatacgactctgacgccctggccgactacagaaagcagagcctgagcagcgaccggtcctacaccgtgacaatcaaggtggacgtggacgacctgagccacatctacgtgtacctgcctgagctggaaaagtacctgaccgtgccttgcgtggaccagagctacaccaagaacctgagcctggatcagcacctggtcaacagaagcttcgccaaggctcacaaccggctgatcggcaagagcgacaccgatctggccatggctcggcaagaaatccaagagatcctggccgatcaggacgacaaggccaagtccagcaccaagatcaagaccagcaagaaggccgctcagtacaagggctacagcaacgagagcgtgaagaacaaggtggccaatcctagcagcgacgacgaaaagagcaacgccgagcactctgaggtgtccgaactggaaaccctgtggaacagcctgcggaagtga

SEQ ID NO: 383 - DNA, 1005 bp, Artificial Sequence
  Synthetic
atgggactgaccgatgccgataaggccaagctgagagagttcaaggactgcttctgcccctacacacccgtgaacgccatcctgaacgacctggaaagcctgtaccagagcagcgagattggcggcgagcagctgtctatgctgctgagaggcgataccggcacaggcaagagcgccatcatcaaccacttcagccacgccaagaacggcagccagagcgagtctattcccgtgctgctgtccagagtgcccagcaagctgaccgtggaagatatgaccaggcagctgctgagcgacctgggagtgtttggcagcacaacccacagagccagaaactcccagtctgacgcccacctgaccaacagactgctggacgccctgaaagtgaagcggaccaagatgatcattatcaacgagttccaagagctgatcgagttcaaaggcgccagagacagacaggccatcggcaacaggctgaagctgatctctgaagaggccgccgtgcctattgtgctggctggaatgccttggatcgacgagatcctgaatgacagccagtgggccagcagactggccaccagaacacacaccctgcagtactttagcctgagcaagcggccccaagagtacagagagttcctggaagctatcgagcagtacatcccctgcgatctggaaaccagcctgaccgacttcgagatctctctggccctgtttgccgccagctgtggcgaaatgagacagctgaaggccattctgaccgagacaatccagctgtgcctgatcaacggcaagcccctgtctaagcaggccctgagcaacagcttcgccaacctgtatagcggcgctgacaaccccttcgagacacccaaagagaagatcaagatccaagaggtcgagatgcacagccagtacatcagaggcgacagcacccacagggcctccatccagcctagaaagctgagcgagatcatgaccctgagccagatcctgtccaagaagtga

SEQ ID NO: 384 - DNA, 1152 bp, Artificial Sequence
  Synthetic
atgaacttcctgccgaatcctatcgagctgtacgagaacgagacactggaaagcgccctgctgagactgtgcagagccaaccacttcgagcactacaacgacctgagcatcgagatcagaagctggctggaagaacatcaccccaccattgccggcgcattccctctggctctggatgccgtgaatgtgtaccacagcaagcagagcagcgccaagagagtgcagtctctgcagctgctggaacagctcgtgggcctgcctaagtttagcctgctggacgtgtccttcaagcacaccaacgccgtggatagcggccactttgccgaagtgcggtacaagcagatcacaatccccaagagcttcgtgcgggcctgcaatgtgcctgtgtgcatcgagtgcctgcgcgagagcaactacgtcagattcgactggcacatcagcaaagtgacctgctgcgacaagcacaaagtgaagctgctgaccaactgtcccagctgcaacaccacactgaactacatgatcagcgaggaccccagcagatgcgtgtgtggctactctctgtttggcgtggactctagcgaggccggcattgatggatggcgaagatggcccagcttcgatcagcagggaaagcagcctttcagcgagcagctggccatgctgttctttctggaccggcacttccccaagctggggcacgaagagttcaacgacgatctgaagggccacatcgagggccatctgcagaagctgatcgaccacagcctgctgattgccaccgacaagatcaaccggctgaccttcagctacctgaccaacaacttcctgagcgacgtggcccagatcagctgcctgcctgactgcatcaaagaatctatcgccagcgtggtcatcgagctggccctggaaacacccagaagcacaatcgccaacctgggcgatagcctggtgtccattagagaggtggccctgatcaccggcagcaccgtggaagatattttcagactgtacgagtccggcatcctgatgctgggcaagagaatcagagatgagggccgcctggaaagcttcaaccccgccttcagactgagagatgtggccgccatcgtgctgagctacagcagatatggctacagccagagcgcctggtga

SEQ ID NO: 385 - DNA, 630 bp, Artificial Sequence
  Synthetic
atgtacatccggaacctgcggaagccctctccaaacaagaacgtgttcaagttcgccagcgccaaagtgatcgagacagtgatgtgcgagagcaccctggaattcgacgcctgcttccaccacgagtacaacgagacaatcgaggccttcggctctcagcccgagggcttctactactacttcgagggcaagagactgccctacacacccgatgccatcctgcggtatatcgacggcaccaccaagttccacgagtataagccctacagcaagaccttcgatcccgtgttccgggccaagttcttcgccaagaaagacgccgccagagagctgggcagagaactgatcctggtcaccgacaagcagatcagagtgaaccccatcctgaacaacctgaagctgctgcaccggtacagcggcatctacggcgtgaccgatatccagagagaactgctgcagctgatcagaaagagcggcaagctccagctgcacgatatcgccagcgagtacaagttccctatcgccgagacaagaagcttcctgtacagcctgatcaacaagggactgatcaaggccgacctgaaccaggacgacctgagctgcaatcctagcgtgtggtgcaacggctga

SEQ ID NO: 386 - DNA, 1854 bp, Artificial Sequence
  Synthetic
atgatggacttcgaggacgagttcaccgagagcaccagcgtgaagaagcctgcctctcctgctcagtacgtgaagctggtggatagcgagctggtcaagcgcgacctggatacctttcctgacttcctgaaagagaaggccctggacaagtacaagctgatctccgtgatcgagctggaaaacagcggcggctggacccagaagaagctggaccctatcctggataagctgttcgagggcaacaccgagaagaggcccaattggagaacagtcgtgcggtggcggaagtcctacatcgagagcaatggcgatctggccagcctggtggacaagagccacaagaagggcaacagaagcaagcggaccgagggcgaagaggtgttctttgagagagccctgctgcggttcctggacgccaaaagacctaaagtgaccaccgcctaccagtactacaaggacgccatcaccatcgagaacgagaacatcgtggacggacagatccccatcatcagctacaagagcttcaaccagcggatcaagagcctgccaccttatcctatcgccgtggccagacacggcaagttcaaagccgatcagtggttcgcctactgcagctctcacatccctccaaccagaatcctggaacgcgtggaaatcgatcacacccctctggacctgatcctgctggacgatgaactgctgctgcctctgggcagaccctacctgacactgatcgtggatgtgttcagcaactgcgtgctgggcttccacctgagctataaggcccctagctatgtgtctgccgccaaggccattgtgcacgccatcaagcccaagacactgaacgacgtgggcatcgagctgcagaacgactggccttgctatggcaagttcgagacactggtggtggataacggcgccgagttctggtctaagagcctggaccacgcctgtaaagaggccggcatcaacatccagtacaaccccgtgcggaagccctggctgaagcccttcgtggaaagattcttcgggatgatcaaccagtacttcctgaccgagattcccggcaagaccttcagcaacatcctggaaaaagaggactacaagcccgagaaggatgccatcatgcggttcagcgtgttcgtggaagagttccacagatgggtcgtcgacatctaccaccaggacagcgacagccgggacacacggatccctattaagcagtggcagcacggcttcgatatctaccctccactgcagatgaccgtggaagaagagaagcggttcaacgtgctgatgggcatcaccgacgagcggaccctgaccagaaacggcttcaagtttgaggaactgatgtacgacagcacagccctggccgactaccggaagcactaccctcagaccaaggataccatcaagaagctgatcaagatcgaccccgacgacctgagcagcatccacgtgtacctggaagaactcggaggctacctgaaggtgccctgcaccgatacaacaggctacgtgtccggactgagcctgcacgagcacaaagtgatcaagaagatcaaccgggaaaccatccgcgagagcaaggacaatctgggcctcgccaaagccaggatggccattcatgccagagtgcagcaagagcaagagctgttcaacaagtccaagaccaaggccaagctgcccgagctgaagaagaaagcccagctggccgacatcagcaacacaggccagggcacaatccggctggaaaagtctgataccctgagcgctatccccaacaagcctgagcctaacatcagcgatatcctggacaactgggacgacgacatcgagggcttcgagtga

SEQ ID NO: 387 - DNA, 1032 bp, Artificial Sequence
  Synthetic
atgaacaccctgacagcccaccagatggaacagctgcggaagttcagcgactgctacgtgatgcaccctcaggtgtccgtgatcttcaacgacttcgacgagctgcggctgaaccggaacttccagagcgatcagcagtgtatgctgctgattggcgataccggcgtgggcaagagccacctgatcaacaactacaagaaacgcgtgctggcctctcagacctacagcagaaccagcatgcctgtgctggtcaccaggatcagcagccacaaaggcctggacgccacactgagacagatgctgaccgacctggaaagcttcggcagccagcagagaaagggcaagaattacaagatcgacctcaagacccagctggtcaagaacctcgtgcgggccaatgtggaactgctgattttcaacgagtttcaagagctgatcgagttcaagacccctaaagagcggcagacaatcgccaacgagctgaagttcatcagcgaagaggccagagtgcccatcgtgctcgttggaatgccttggacagagcagatcgccgaggaacctcagtggtccagcagactgatcagacggcggagactggaatacttcagcctgcagaaggacagcaagtactaccggcagtacctgatcggcctggccaagcacatgcccttcgatgagcctccaaagatcgaggacaagcacattgccattcctctgttcgccgcctgcagaggcgagaacagagccctgaatcatctgctgagcgagacactgaagctggtcatggtcaacggcgacagaagcctggacatcagacatctggcccacacctaccggaagctgtacgagtctcacgagagcgaggccacctctatcttcgtgaaccccttcctggaacctctggacaaggtgctgatctccgaggtggtcaagcccagcagatacaaccccaacgccatgacacccgaggacatgctgatccccagagagtttagcgagcccttcacactggcccagctgctgtctaagtga

SEQ ID NO: 388 - DNA, 1233 bp, Artificial Sequence
  Synthetic
atggccttcctgttcagccctaaagtgcgggcctacagcgacgagagcctggaaagctatctgctgagagtggtggccgagaacttcttcgacagctacgagcagctgagcctggccatcagagaggaactgcacgagctggattttgaggcccacggcgcctttccaatcgagctggaaagactgaacgtgtaccacgccaagcacaacagccacttccggatgagagccttcagcctgctggaaagcctgctgaacctgcctcctcacgagctgcagaaactggccctgctgcggagcaacaagagattcgttggcggcatgagcgccgtgcacagaaacggcgttgacatccctctgagcttcatcagatacgccgacgacggcatcgagacagtgcctgtgtgtccccagtgcctgaaagaggaagcctacatccggcaagtgtggcacctgaagcctgtgaacgtgtgtgccaagcacgagtgcgagctgctgcaccactgtcctgagtgtcagcagcccatcaaccacatcgagaacgagagcatcaatcactgcgcctgcggcttcgatttcaccaccgcctctagcaagaaggccgacaatcaagaggtggccctggccagatctctgtttgaaggcgacgccctgagcaacaaccctctgctgtttatgggcaccagcgccacacagagattcgccgctctgctgtggtacaagaagcggcacgccaagaacatcgagtgcaagctggacgagagcgtgaactacttcgaggcctggcctaagaacttctaccaagagctggatgagttcgtggctggcgccgagctgaagctgatcgacctgttcaacagaaccagcctgtccttcatcttcggcgagctgatcctgcagagccagtgtctgctgcccgaggataagacccctcacttcatctacatgggcctgatggaatacctgagcaagctggtggaatctcaccccaagagcaagaaacccaacgtggccgacatgctggtgtctgtggctgaagcagctgtgctgctgagcacctctcacgaacaggtgtaccggctgtaccaggacggcatcctgacaagcgccatccggcagaagatccggaccagaatcgatccccacatcggcgtgttctacctgcggcaagtgatcgagtacaagaccagcttcggcaacgacaagcagggcatgtacctgtccacctggtga

SEQ ID NO: 389 - DNA, 630 bp, Artificial Sequence
  Synthetic
atgtacatccggaacctgcggaagccctctccaaacaagaacgtgttcaagttcgccagcgccaaggtgtccgagacaatcatgtgcgagagcaccctggaattcgacgcctgcttccaccacgagtacaacgaaaccatcgagacattcggcagccagcctaagggcttctactactgcttcgagggcaagagactgccctacacacccgatgctctgctgcactacatcgacggcaccaccaagttccacgagtataagccctacagcaagaccttcgatcccatcttccgggccaagttcgtggccaagaaagaagccgctcaggccctgggaacagagctgatcctggtcaccgacaagcagatcagagtgaaccccatcctgaacaacctgaagctgctgcaccggtacagcggcatctacggcgtgaccgatatccagagagaactgctgcagctgatcagacacagcggcaagattcagctggacgacgtggccgatgagtacgagctgtctgtgggcgagacaagaagcttcctgtacagcctgatcaacaagggcctgctggaagccgatctgacccaggatgacctgagctgcaaccccttcgtgtggtgcaatgcctga

SEQ ID NO: 390 - DNA, 1854 bp, Artificial Sequence
  Synthetic
atgatcgagttcaaggacgagttcaccgagagcaccagcgtgaagaagcccgatacacccggccagtacatcaagctggacgacgccgagatcctgaagcgcgacctggatacctttcctgacttcctgaaagagaaggcctttgacaagtacaagctgatctccttcatcgagcaagagaacagcggcggctggacccagaagaagctggaccctatcctggacaagctgttcgagggcaacagagacaagaggcccaattggagaaccgtcgtgcggtggcggaagtcctacatcgacagcaatggcgatctggccagcctggtggtcaagagacacaagatggggaaccgcaagaaaagagtggaaggcgacgaggtgttcttcgagagagccctgagcagattcctggacgccaagcggcctaaagtgaccaccgcctaccagtactacaaggacgccatcaccatcgagaacgagacaatcgtggacggcgagatccccatcatcagctacaccgccttcaaccagcggatcaagagcctgcctccttatcctatcgccgtggccagacacggcaagttcaaagccgatcagtggttcgcctactgcagctctcacatccctccaaccagaatcctggaacgcgtggaaatcgatcacacccctctggacctgatcctgctggacgatgaactgcagctgcctctgggcagaccctacctgacactgatcgtggatgtgttcagcaactgcgtgctgggcttccacctgagctataaggcccctagctatgtgtctgccgccaaggccattgtgcacgccatcaagcctaagacactgggcatcgtgggaatcgagctgcagaacgactggccctgctatggcaagttcgagacactggtggtggacaacggcgccgagttttggagcaagtctctggaccacgcctgcaaagaggccggcatcaacatccagtacaaccccgtgcggaagccctggctgaagcccttcgtggaaagattcttcgggatgatcaaccagtacttcctgaccgagctgcccggcaagaccttcagcaacatcctggaaaaagaggactacaagcccgagaaggatgccatcatgcggttcagcgtgttcgtggaagagttccacagatggatcgtggacatctaccaccaggacagcgacagccgggacacacggatccctattaagcagtggcagcacggcttcgacgtgtaccctccactgcagatgagcgtggaagatgagaagcggttcaacgtgctgatgggcatcaccgacgagcggaccctgaccagaaacggcttcaagtttgaggaactgatgtacgacagcacagccctggccgactaccggaagcactaccctcagaccaaggataccatcaagaagctgatcaagatcgaccccgacgacctgtccaacatccacgtgtacctggaagaactggaaggctacctgaaggtgccctgcaccgatacaacaggctacgccaatggcctgagcctgcacgagcacaaagtgatcaagaagatcaaccgcgagatcatcagagagagcaaggacaacctgggcctcgccaaagccaggatggccattcatgccagagtgcagcaagagcaagagctgttcaacgagtccaagaccaaggccaagatcagcgccgtgaagaaacaggcccagctggccgacatcagcaataccggacagggcacaatccggctggaaaacagcgacaccctgagcgacatcaccaacaagcctgagagcaacatcagcgacattctggacaactgggacgacaacatcgagggcttcgagtga

SEQ ID NO: 391 - DNA, 1032 bp, Artificial Sequence
  Synthetic
atgaacaccctgacagcccaccagatggaacagctgggcagattcaacgactgcttcgtgatgcaccctcaggccaaagtgatcttcaacgatttcgacgacctgcggctgaaccggaacttccagagcgatcagcagtgcatgctgctgaccggcgatacaggcgtgggaaagagccacctgatcaacaactacaagaaacgcgtgctggcctctcagacctacagcagaaccagcatgcctgtgctggtcaccagaatcagcagccacaaaggcctggacgccacactgagacagatgctgaccgacctggaaagcttcggcagccagcagagaaagggccagaattacaagatcgacctgaaaacccagctggtcaagaacctcgtgcgggccaatgtggaactgctgattttcaacgagttccaagagctgatcgagttcaagacccctaaagagcggcagacaatcgccaacgagctgaagttcatcagcgaagaggccagagtgcccatcgtgctcgttggaatgccttggacagagcagatcgccgaggaacctcagtggtccagcagactgatccggcggagaaagctggaatacttcagcctgcagaaggacagcaagtactaccggcagtacctgatcggcctggccaagcacatgcccttcgatgagcctccaaagatcgaggacaagcacattgccattcctctgttcgccgcctgcagaggcgaaagcagagtgctgaatcatctgctgagcgagacactgaagctggtcatggtcaacggcgacagaagcctggacatcagacatctggcccagacctaccggaagctgtacgagagccaagagtctgaggccgccagcgtgttcttcaaccccttcctggaacctctggacaaggtgctgatctccgaggtggtcaagcccagcagatacaaccccaacgccatgacacccgacgagatgctgatcaagagagagttcagcgcccctagcacactggcccagctgctgtctaaatga

SEQ ID NO: 392 - DNA, 1236 bp, Artificial Sequence
  Synthetic
atggccttcctgttcagccctaaggccagaagcttcagcgacgagagcctggaaagctacctgctgagagtggtggccgagaacttcttcgacagctaccagcagctgagcctggccatcagagaggaactgcacgagctggattttgaggcccacggcgcctttccagtggaactgaagagactgaacgtgtaccacgccaagcacaacagccacttccggatgagagccctgggcctgctggaatctctgctggatctgcctcctcacgagctgcagaaactggccctgctgcggagcaacaagagattcgttggcggcatgagcgccgtgcacagaaacggcgttgacatccctctgagcttcatcagatgcgccgacgaggacggcatcgagtccctgcctatttgccctcagtgcctgaaagaggaaccctacatcagacaggcctggcacatcaagcccatcgaagtgtgcgccaaacacgagtgcgagctgatccaccactgtcctgattgccagcagcctatcagctacatcgagaacgagagcatcacccactgcagctgcggcttcgaatttgccacagccagcagcgagaaggccgattctcaggctgtggtgctgagcagaagcctgtttgacggcgacgccctgagcaacaaccctctgctgtttatgggcaccagcgtgacccacagattcgccgctctgctgtggtatctgaagcggcacgtgcagaacattgagtgcaagctggacgagagcgtgaactacttcgaggcctggccagagaatttctaccaagagctggatgaactgctggcaggcgccgagctgaagctgatcgacctgttcaacagaaccagcctgtccttcatcttcggcgaactgatcctgcagagccagtgcctgctgcctgaggataagacccctcacttcatcgacatgggactgatggaatacctgggcaagctggtggaatctcaccccaagagcaagaaacccaacgtggccgacatgctggtgtccgtgactgaaacagccgtgctgctgagcaccagccacgaacaggtgtacagactgtaccaggacggcgtgctgaccgccggcttcaagcagaagatccggaccagaatcgaccctcacatcggcgtgttctacctgcggcaagtgatcgagtacaagaccagcttcggcaacgacaagcagggcatgtacctgagcgcttggtga

SEQ ID NO: 393 - DNA, 690 bp, Artificial Sequence
  Synthetic
atgagcgccctgcctttcctgtctatcgccacactgctggaactggaaaccgccttcgatacccctgccagaaacctgaccaagagccggggcaagaacatccacagatacgtgtccgccaagatgggcaagcgcgtgaccgtggaaagcttcctggaatgcgccgcctgctaccacttcgacttcgagccttctatcgtgcggttctgcagccagcctatccggttcagctacagcctgaacggcaagacccatacctacgtgcccgacttcctggtgcagttcgataccggcgagtaccggctgtacgaagtgaagtccgacaaagagagcagcaaagaggaattccactgcgagtgggaagccaaggtgcagggcgcctttgagatcggcctggatctggaactcgtggtggaagaggaaatcctggacgtcgtcatcttcaacaacctgaagctgctgcaccgctacgccagccgggacaatctgaacgacttccaccagatcctgctgaccacactgaagcggaatggcacccagacagccaagtctctgggacaccacctgggcctgaatggcagaaagatcctgccatttctgtgcgacctgctgagccggaatctgctgcagacaagcctggaaacccctctgtctctggaaagcgagttcgagctgggctgctacgcttga

SEQ ID NO: 394 - DNA, 1812 bp, Artificial Sequence
  Synthetic
atgcccaagaagtccttcagcagcttccacagaaagagcgccctgcagcaagagaagctggaacagaacgacagagtggtggacagcaacgacgtggacgaggccacctaccaggacatcagcgcctttccagagaatatcgccaaccagatcaccttccggctgagcatcctgagatttctggccggcaagtgcgagaagatcacccctaagaccatcgagccctacagagtggctctgcagcagctgcacgacaagaacatccctagcgccatcagcatctaccggtggtggctggtgtttagagccagcggctacaaccccgtgtctctggcccctgactttaagagcagaggcaacagaggcgccaaggtgtcccctatcgtggactccattatcgagcaggccgtggaaagagtgatcagcggccggaagatcaacatcagctctgcccatcggagagtgaagcggaaagtgcggcagtacaatctgacccacggcacaaagtacccctatcctaagtacgagagcgtgcggatcagagtgaagaagaaaacccctttcgaggtgctggccgccaagaaaggcgagagagtggccaagcgcgagttcagaagaatgggcaagaagattaccaccagcgccgtgctggaacgcgtggaaatcgaccacacaatggtggacatcttcgccgtgcatcccgtgcacagagtgacacttggtagaccctggctgacccagctggtggactgttactctaaggccgtgatcggcttctacctgggcttcgagcctcctagctacgtgtcagtcagcctggctctgaagaacgccatccagagaaaggacgacctgctgagcagctacgagagcatcgagaacgagtggctgtgctacggcatccccgatctgctggtcaccgacaacggcaaagagttcctgagcaaggccttcgacaaggcctgcgagagcctgctgatcaacgtgcaccagaacagagtggaagtgcccgacaacaagcccgacgtggaacggaagtacggcaccatcaataccagcctgctggacgatctgcccggaaaggccttcagccagtacctgcagagagaaggctacgacagcgtgggcgaagccacactgacactggacgagatccaagagatctacctgatctggctggtggatatctaccacaaggactccaaccagcggggcaccaactgtcccaatatcgcctggcggaatggctgccaagagtgggagcctgaagagttcagcggcagcaaggacgagctggacttcaagttcgccatcgtggatagcaagcagctgaccaaggctggcgtgaccgtgtacaagggcctgacatacagctccgagagactggccggctacagaggcaaaaagggcaaccacaaggtgcagttcaagtacaacaccgagtgcatggccgtgatttgggtgctcgacgaggacgtgaacgagtacttcaccgtgaatgccatcgactacgagtacgcctctggcgtgtcactgtggcagcacaagtacaatatcaagtacctggccgagctgaacagcgccgagtacgatgaggacaaagagatcgacgccgagatcaagatcgaggaaatcgccgaccggtccatcctggaaacaaagaagatcagaagccggcggaggggcgccagacaccaagaaaattctgccagagccaagagcatcagcaacaccaagctggtgcctccacagaaggacgaggaagagatcgtcatcgtcgacaacgaggactgggacatcggctacgtgtga

SEQ ID NO: 395 - DNA, 993 bp, Artificial Sequence
  Synthetic
atgaacgagacaagagaggcccggatcagcaaggccaagagggcctttgtgtctacccctagcgtgaccaagatcctgggctacatggacagatgccgggacctgagcgatttcgagagcgagcctacctgcatgatggtgtttggagcctctggcgtgggcaagaccaccgtgatcaagaagtacctgagccagaacaaccgggacagcaaagtgcggggagagatcgtgcctgtgctgcacattgagctgcccgacaacgccaagcctatcgatgccgctagagaactgctgctggaaatgggcgatcccctggctctgtacgataccgacctggccagactgaccaagaagctgaccgatctgatccctctcgtgggcgtgaagctgatcatcatcgacgagttccagcacctggtggaagagagaagcaaccggatcctgacacaagtcggcaactggctgaagatgatcctgaaccggaccaagtgtcccatcgtgctgttcggcatgccctacagcaaggtggtgctgaaggccaactctcagctgcacggcagattcagcatccagtgcgagctgcggcccttcagctatcaaggcggagagggcgtgttcaagaaattcctggaaaacctggacaagctgctgccgttcgtgaaagaagccggactggccgagaagaacctgcagaagaagctgtacgccttcagcgagggcaacatgcggagcctgagaaacctgatctaccaggccagcgtgaacgccatcgacaaccacagagccaccatcatctacgaggacctggtggtggccgccgagctgacatgtagcaacaagacctacacctggaagaaccccttcgagaacggcgtgaaagtgaccgaggaaatgctgcggcctcctccaaaggatatcggctgggaagattacctgaagaacatcaacagccggtccaagagcaagctgaacggcggcaacatgttcgagtga

SEQ ID NO: 396 - DNA, 1185 bp, Artificial Sequence
  Synthetic
atgctgctgcagaggcctaagcctcacagcaacgagagcctggaaagcttcttcatcagagtggccaacaagaacggctacgaggacgtgaacagattcctgatggccaccaagagatacctgcaggacatcgactgcagcggcttccagacattccccaccaacatcggcaagatgaaccccgcctctgccaagtctagcagctctgccagaatcgccagcctgctgaaactggcccagctgaccttcaacgagcctcctgaactgctgggcctcgccatcaacaggaccaacctgaagtacagccctagcaccagcgccgtgatcagaggcagcgaagtgttccctagaagcctgctgcggaccaagagcatcccttgctgtagcctgtgcctgcagcagaatggctacgccagctacctgtggcacttcgagggctacgatcactgccacatccacaacaccccactgatcaccgcctgtagctgcggcagcgagttcgactatagagagtctggcctgaagggcaactgctccaactgcaaagagcccattgccatcaagagcagcgaggtgtcccacgaagtgatcttcaccgtggccaactggctggccggcaacgagtctaagaacctgcctgatgtgcccaagagctacagatggggactcgtgcactggtggctgcacctgaacgacaacaagttcgaccatctgctgttcacccagttcttcagcaactggccctccagcttccacagcatgatcgacagcgagatcgagttcaacgtggaccacgccatcgtgggcagaaaagaactgagagtgaaggacctgatgggccgcatcttcttcagctccatcagactgcccgagcggaacctgcagcacaacatcgttctgggcgaactgctgagacacatcgagacacacctgtggaacagcaacggcctgatcgccaacctgagaatgaacgccctggaagctgccgtgttcctgaattgcagcatggacgaagtgaccagcatggtggaacagagaatcctgaagcctaaccgcaagaccaagcctaacatgcccctggccgtgaacgactacctgttctacttcggcgacatcttctgcctgtggctggctgagttccagaccgacgagttcaatcggagcttctacgtgtcccggtggtga

SEQ ID NO: 397 - DNA, 624 bp, Artificial Sequence
  Synthetic
atgtacgtgcggaacctgagaaagcccagcgccaacaagaacgtgtacaagttcgtgtccgtgaagaacggctgcaacatcatgtgcgagagcagcctggaatacgactgctgctactacctcgagtacagcgacgatgtcgtgcgctaccagagccagcctaaaggctacagattcccctaccaaggcaaagagcacccctacacacccgactttctggtgcacaagaaggacggcaccagctacctgctggaagtgaagcctctgagcaagaccttcagcagcgagttccaggacgtgttccggcagaaacagatcatggccagcgaactgggagcccctctgctgctggttaccgacagacagatccggaacgacgtgcacctgaacaacctgaagctggtgcaccggtacagcggctgcatcggcaatagcagccacctggaatctgtttggagcgccgtgaaccagagcagcagcatctgtatcaaggccctgagcgccatcctgaacctgacaatcggcgaggtgttcgccagcgtgctgagactgatcggactgggcaaagccaagaccaagctggacgtgctgctggacgagaacagcctgatctctgtggcctga

SEQ ID NO: 398 - DNA, 1908 bp, Artificial Sequence
  Synthetic
atgagcttcggccccttcgaggatgagttcggcagcatcaccaacgacgtgcagcagcagtatgaggcctctcctgaggccaagctgagccggctgaagtactctcctctggaaaccaccaaagtgatcgagcgggacctgagcagcttccccgaggaacagaaactgaaggccctggaacggtacaagctgatctccctgatcgccaaagagatcaacggcggctggacccctaagaatctgatccctctgatcgacaagcacatcgagacactgaacatccccaagcctagcgaccggaccgtgaagagatggtacaaggccttctgcgagagcgacggcgacatcaagagcctggtggatagccaccacctgaagggcaacagacagcccagaatcgaggacgacgagccattcttcatcgaggccgtggaaagattcctggacgccgtgcggcctagctacagcaaagcctaccaggtgtactgcgaccggatcgagatcgagaacagcaccatcgtgtccggcaagatcgccaaggtgtcctacgaggccttcaagaagcggctgaagaagctgcctccttacacagtggccctgaagcggcacggcaagtactacgccgacaagctgttcaactactatgaggccgtgaagatgcccacacggatcctggaaagagtggaaatcgatcacacccctctggacctgatcctgctggacgatgaactgctggtgcctctgggcagagcctacctgacactgctcgtggatgtgttcagcggctgcatcatcggcttccacctgggctttaaggccccaagctacaccgccgtgtccaaggccatcatccacagcgtgaagtccaaagaatacgtgaacgagctgcccatcggcctgagcaaccagtggatctgccacggcaagattgagaacctggtggtggacaacggcgccgagttttggagcaagtctctggaccaggcctgcattgaggccggcatcaacatcatctacaacaaagtgcggaagccctggctgaagcccttcgtggaacggaagtttggcgagctgatccagggcatcgttggctgggttcccggcagaaccttcagcaacgtgctggaaaaagaggactacgaccctcagaaagacgccgtgatgcggttcagcgtgttcgtggaagaactgcaccggtggatcatcgacgtgcacaatgccagcgccgacagccggcacacaagaatccctaactaccactggcagaaaagcgaggaagtgctgccacctcctgctctgaccgagagagatgagatccagttcagagtgatcatgggcatggtgcacaaaggcgccctgaccagcaagggcatcaagttcaagcacctgatgtacgacaacgtggccctcgagcactaccggaagcagtaccctcagagcaaggacagccggatcaagacagtgaagatcgaccccgacgacctgagccggatcttcgtgtttctggaagagaagaaaggctacatcgaggtgccctgcaaatacgatcccctgggctacaccaagaaactgagcctgtgcgagcacctgagaaccgtgaaggtgcaccgggacttcatcaaaggacaggtggacagcctgagcctggccaaagctagacaggccctgcacgagcggatcaagcaagagcacgagaacctgcggcagatgagcctgcctcacagagccaagaaggccaagaacggaaagaagatggccgagctggctggcgtgaacagcgatagccctaagtccatcaccacagactaccccatcgaggacaccatccagctgcacgagagcaccccagtggatgatctgcagagcctgtggaacaagcggagagccctgagaaagtctggcaagtga

SEQ ID NO: 399 - DNA, 987 bp, Artificial Sequence
  Synthetic
atgacaagcctgcagcctaccaacaacgacgtggacgtgctgctggccgagttccaccagagctttgtggtgtaccccgacgtggaaaaggtgttcgaaggcctggattggatcgtgcggagaagccagttcggcaagttcgcccctagcatgctgatcactggcggaacaggcgccggaaagacaagcgtggtggaaatctacctgaacaaccacttcagcagcagcgaggtgctgattaccagagtgcggcccagcttcgtggaaaccctgatctgggccatcgagaagctgaacgtgccctacaacagcagaagcaagcggagcgagatcggcctgcaggactacttcatcaacagcgtgaagaagtccaagctgaagctgctggtcatcgaggaagcccaagagctgttcgagtgcgctagccccaaagagcggcagaagatccgggacagactgaagatgatcagcgacgagtgcagactgcccatcgtgttcatcggcatccctaccgccaagctgatcctggaagatagccagtgggacagacggatcatggtcaagcgggacctgccttacatccggatcaccaacgaggaatccctggacgtgtacattgccctgctggaaggactggaaaagaccctgcctatcagcgtggcccctgagctgaccgatatggatatggccatgagactgctggctgcctccagaggaatgctgggcctgatcaaagaactcgtgggctacgcctttgagctggctctgctcgagggcaagagacagatcacccagaacgagttcgtgcaggccttcaagagcatcttcggccccgacatcagcaaccccttcgagatcgagctggacaagctgctgatccctcagatcatcgagtacgagggctacctgctggacagcgacagcggcgatatcaagttcacccaccagatcttcgaggacatccctctgaccgagctgctgagatga

SEQ ID NO: 400 - DNA, 1212 bp, Artificial Sequence
  Synthetic
atggacaccgacatcgaggtgtacagcgacgagagcctggaaagcttcctgctgcggctgagcaagttccagggctacgagagattcgcccacttcgccgaggacatctggcagacaacactgctccagcacgaggctatccctggcgcctttccattcgagctgagccggatcaacatctacaaggcccagaccaccagccagatgagagtgcgggtgctgatcgacctggaaaagcggctgaagttcaacgacttcggcgtgctgagactgtctctggcccacagcaaagccagcttcagccccgattacaaggccgtgaacagatacggcgccgactatcctcaggccttcctgcggaagaacttcacccctgtgtgccccaagtgtctggatgaggccgcctatatcagacagctgtggcacttcatcccttaccaagtgtgccacaagcaccattctcagctggcccagagatgccctgagtgtggcaagctgctgaactaccagagcagcgagctgatcgagaactgcgagtgcggcttcagcctgctgaatggcgagagcgagaaagagagctgcagcaccctgtttgtggcccaatggctggccggcgagaagcctgttgaaagcggcctgatgagccaagagctgacccagtccagcagattcggctttctgctgtggtacatcaaccgctacggcgagctggacgacatcagcttcgatggcttcgtggaatgctgcaagagctggcctaacaagctgaacaccgacctggacagcatcgtgcagaaggccgacatcgtcagaatccagccttggaacaagatctacttcagcgaggtgttcggcgacctgctgaaagagtgcagaagcctgcctagccgggacctgagcaagaaccccgtgctgaagaacgtggtgctgtacttcagagccctgatcaccaacaatcccaaagtgaagtccgccaacatcggggacgtgctgctgtctcctctggaagcctctacactgctgagctgcaccaccgacgagatctaccggctgtaccagttcggacagctgaaggcccagcacacccctaagctgcagagcaagatcgagaatcaccacagcgtgttcaccctgcggagcatcatcgagctgaaactgagcagcatgtgcagcgagacagacggcctgaaccactacctgcctgagtggtaa

SEQ ID NO: 401 - DNA, 2508 bp, Artificial Sequence
  Synthetic
atgtacaccagaacactgcggccctctccaatcaagcacatctacaagttcgccagccacaagaacggcaacgtgcagaccgtggaaagcagcctggaattcaacgcctgcttccacttcgagtacgccaacgaagtgcggagctttatcgcccagcctgagggcttctactaccagttcgaggaccggacctgcagctacacccctgacttcgagctgttctgccacagcggcaagaaagtgttcgtggaaatcaagcctcctccagaggctctgaagcacgacttcatccagcggttcaccgccaagaaaaaggccgtggaaatgctgggcaaagagctgatcctggtcaccgacagacagatcagcagcatgcccaagctgaagaacctgaagctgatcaacagatacgccggcctgtacaccgaggtggtgtcccggaagaaaatctacgagtggatccggaagttccagggcctgacaatcgccgacatcagcgaactgtctggcgccgatagcagcgagatcctggtggatgtgatgtggctggtggcctccggcaaggtgttcatcaacatcgaggaaatcttcggctacgagagcttcttcggcctggaacgggccatgagcatcgatttcttcaacgacgagttccccgacttccagaactggaaggccagcgcctttgtggacgcccagtacatgacagccagcgagcacctgagctacatcagcttcgacagcctgagcaacaagctgcaagaggaagcctactacaagtacaaagtgatcatgctcgtgggcgagagactgcaaggcggctggaccaagaagaacatcgagcccatcatcaacagcctgttcgagaagggctacatcgagaagaagcccagctatcggagcgtggccagatggcacaagagctacgatcaggacatcggcctgaagtccctggtgtctgccaagggcctgatgaagtcccctggcaacagcaagaaggacgacgccgacttctacaagagagccgtggaagagaagttcctgaagcgcgagaggcctcacgtgtccaccgcctactaccactacttcaacaacatcctgctgtacaaccgggctcaccccgacaacatcatcgagcctattaccaagagcgccttttacaagcgcgtgaagaagatgagcccctacgaggtggaagtgggcagatttggaaaggccgaggccgacaagaactaccggatcgtgaacaagttcagcagccccgagcgcgtgatggaaagagtggaaatcgatcacacccctctggacctgatcctgctggacgataccctgctgatccccatcggcagaccctacctgaccatcctgatcgactgcctgtccagatgcatcatcggcttctacctgagcttccaagagcctagctacaacagcgtgcggagcggcatcatgaacgcctgcctgaacaaagaaggcgtgatcgagaagtaccagatgatcaagaaggattggccctgccagggcaagatcgagacactggtggtggataacggcgccgagttctggtccagcaacctggaatacttctgcgccagcgtgggcatcaatatcgagttcaaccccgtgggcaagccctggaagaaacccctggtggaaagactgttcgccatctacaactccaagttcgtgaaagagatccccggcaccaccttcagcaacgcccaagagctgagcggctacaagcctgagaaagacgccgtgctgcccttcagctacttcatcgagctgatgcacgtgtgggtcgtcgatatctacaatcagagccccaacagccggatgacacggatccctgctctgtcttgggagatgggctgcaagaagtaccctccacctctgtacagcggcttcgaggaaaagatcttcaagattgaggctttccccaccgagagccggatcctgagaaaaggcggcatcagcatcgacggcatcgactacaccaacgaggaactggtggaataccggaaagtgacccctccaccacctggcagcaaggtggtcaaggtcgtgatcaagagggaccccgaggacgtgtcctacatctacgtgtacctggtcgagcggaaagagtacatcaaagtcaccgccgtggatcccgattgcctgtacgatggcctgagcatcttccagctgaaagtgcggcggaagctgcggagaaacttcatcaatagcaagaccgactacctgggcgtcgccgaagccgagaagctgattgacgatcgggtgtccgagatcgccgaggaagtgtctgcctctaagaagaagatcaagggcaccaagaaggccgctgcctacttcggcatctccagcgagaatcccagcagcatcatggacggcttcgccagcaaagagatcgttaatatcgaggaagagagcaagagccactccggcgtgaaccccaacgatgaggaatggaagcggatcagcgacgacctggaaccttacagctga

SEQ ID NO: 402 - DNA, 1020 bp, Artificial Sequence
  Synthetic
atgagcatgctgatctccaacgagaagctggaacagcagatctacttcaagaactgctacgtgaagcacagcagcgtggccagagccatcagcagcctggaaatgctgaaggccaatcacgccctcggcggagagcaacagtgtatgctgatcatcggcgatcccggcagcggcaaaagcagactggtgcaagagttccagtctcagtaccccgagtacgtggaaaacgacaccgtgatcaagcccgtgctggcctctagaatccccagcaagcctgacgtggaatccatgctgattcagctgatgatggacctgggccagtttggcgccgacaccagaagagagagaagaagagaggccggactggccgaggctctggtcaagatgctgaagaaatgcaagaccgagatgatcattatcaacgagttccaagagctgatcgagttcaagtccgtggaagagagacagcggatcgccaacatcctgaagctcgtgaacgagaaggccaacattcccatcgtgctcgtgggcatgccttgggccgctgagatctctaatgaaccccagtgggccagcagactcgtgtgcacaatcgagctgccttacttcaagttcctgaacctggaagatcgggtcgagttcacccggttcatcaaaggcctggccagcaagatgggcttcgagaagcctcctggcctgcacagcaacgagatcctgtttcctctgttcagcgtgaccaggggcgagacacggcagatcaagagaatcctggaagccgctctgtgcgtggccctgagcaagaacgagaacaccgtgtgcaagtaccacttcgtggacgcctgcgacaagatctttgtgggcatgaacaaccccttcaagctcgaactggaagatgtgcccatcagcgaggtgtccaagtacagcagctacaaccggtacagcaccgtggaaagcgagatgttcgtgtctacccagtttacccggaagatccccaccaaagagctgttcagcaagacctga

SEQ ID NO: 403 - DNA, 1239 bp, Artificial Sequence
  Synthetic
atgaagctgctcgtgcggcccagacctttcatcaacgagagcctggaaagctacatgctgcggctgagccaagagaacttcttcgagtactaccagcagctgagccgggccatcaaggattggctgcaactgcacgatcacgaggccgctggtgcctttcctgaggaactgagcagactgaacgtgtaccacgccgctcagagcagcagcagaagaatcagagccctgaagctggtggaaagcctgaccgacaacgagaagctgcctctgctgcatctggccgtgatgcacagcagcgagaagttctgcagccggtacagcagcgtgttctacgccggatctcacgtgccaagagcacttgtgcggcagaaaggcatccctgtgtgccctgattgtctgaccgaggccaactacatccggcaagagtggcactggatgccctacgaggcctgcatcaatcacggcaagcagatgctgcacgagtgccccaagtgcgaggaaaagctgaactacacccacagcgagtgcctgcacacctgtagatgcggcttcgacctgagaaacgccgataccgagcctgccgatgagtggcagctgatcgcctctagactggttgtgggcgagccctctcctagcaatcaccctctgctggacatcagaagcgtgtccctgagactggcctgcctgctgtggtatcagctgtacgcctacaagaccctggacgccagcaatcaggtgcccacactgacaatcgagcgggccatcgagtacttcacccactggcctgaggtgttcacccaagagctggaacagcaggctgccctgtctggcgagaagctcgtgtgcgactacaacaagaccagcttccgggacgtgttcggcaacatcgtgggcatcagtcggctgctgctgaaggcctatcctgagagcgacttcgtgctgacccctctggaaaacttcctggccagactggtggaccagaatccacagagcagagtgcccaacgtggccgacctgctgatctctatgcctgaggccgctatcctgctgggcacatcttacgagcaggcctaccggctgtacgaagagggctatctgaagtgcgccgtgaagttcaagagccacgagaaactggtcaacggcatcggagtgttctacctgcgcgagatcatggaactgcggcagagcagaatccccgtggaagccagcagctacaacaactacctgcctgcctggtga

SEQ ID NO: 404 - DNA, 687 bp, Artificial Sequence
  Synthetic
atgcagccttctcctgccaccacctaccagacagacagccctctggaattcgccttcacacagcccgccagaaagctgaccaagagccggggcaagaacatccacagatacgtgtccatcaagatgaacaccatcatcagcgtggaaagcaccctggaatttgacgcctgcttccacttcgacttcaacaagaatatcagccggttctgcagccagcctatccggtacagctacgtgatcgacggcatcatcagaacctacgtgcccgacttcctgtgcgagttcgattgcggagagatggtgctgtacgaagtgaaggcccctaacgccgtgaacagcaagcggttcaccaaagagttcgaggccaagcggcagtacgcccggaagctgtttgatgtggacctggaactgatcgaggaacacgacatccggcacatccctctgctgaagaacctgaagcacatgcaccgctacgccagccacagcgagctgacatacgagcagaccaccatcctgaagtatctgaacaagcacggcagcaccaagctggaaaccatcatcgaccacttcagcaactctaagaacatcatccccatgatctacgacctgctgagcaagtacctgatcaacaccgacctgcgggtgctgctgaacaaccagaccgagctgaaaaccacctacgtgtga

SEQ ID NO: 405 - DNA, 1813 bp, Artificial Sequence
  Synthetic
atgagcagaaccagcttcagcagcttccacggcacccctacaagcgacagcgagaatgccagcagcaagctgaccttcatcgagaacgacgacctgcaggacctgaccagcttctccaagaaggcccagaacgaggccaagttccggctgagcatcctgcggaacatcctgaacaagagcagcgagatcaacctggtgctgatcgagagactgcgggccgatctgcaacaacagggcgagagatctatccccagcgccatcaccatctaccggtggtggctgacctacaagaagtccaacttcagcatcctgagcctggtgcctaagaccaagcagaagggcaacagaaacaccaaggtgcccaagacaatcagcgtgtacatcgaccaggccgtggaacaagtgatcagcgccaacaagatcaacgtgtccaccgcctttcggagagtgcggagaaaagtgcggcagtacaatctgacccacaagacgaagcacacataccccagctacgaggccatccggaagagagtgaagaagatcaccccttacgagaaactggccgccagcaagggcgacagaatcgccaagcgcgagttcagacggatgggcaagaagatccagaccgagtacctgctggaacgcgtggaagtggatcacacctggctggatctgttcgccgtgcacgaggaacacagagtgcctatcggcagaccctacctgacacagctggtggactgtcacagcaagagcgtgatcggcttctacctgggcttcgagcctcctagctacatgtctgtggccctggctctgaagaacgccatcaagcggaaggacaacctgctgcagaactaccccagcatccagaatgagtggctgtgctacggcatccccgatctgctggtcaccgacaacggcaaagagttcctgagcaaggacttcaccctggcctgcgacagcctgctgatcaacatccaccagaacagagtggaaacccctgacaacaagccccacaccgagagacagtacggcaccaccaataccgaactgctgaacgacctgcctggcaagaccttcagcaactacctgcagagagagggctacaacagcagcgacgaggcctctctgacactgtccgagatcaagcagatctacctgacttggctggtcgacatctttcaccccagacctaacagccggggcaccaactgtcccaacagagtgtggaagcacgccgagaagaactggcctcctaacgagttcctgggcaccgacgaggaactggacttctacttcaccaagctggacaagcggatgctgcggaaagaaggcatcggactggccaccgagctgttctacagctctgagagactggccgagtaccggggcaagaaaggcaatcacaaggtggccatcaagtacaaccgcgagaacatgggcttcatctgggtgctcgacgaggacaccgagtcctactttaaggtgcccgccatcgactacgagtacgccagcacagtgaccctgtggatgcacaagaagaacctgaagattaagcaagagctgaacatcaccgagcacaacctggactccgagatcgacgccgagctgagaatcgacgagatcgtggaccagtccatccagaagaagaaaaccaccatcaccaacaagcggagagccgccagataccaagagaacgagcagatggccgccaacgccagacagcccaaagagaagaagtccgccaacaaccagaaaaccagcaccaagaacatcgagaaagaggacagcagcggctgggacatcgattacgtgtgag

SEQ ID NO: 406 - DNA, 987 bp, Artificial Sequence
  Synthetic
atggacgacaacatcaccagaatcgccaaggccaagaaggcctttatcagcacccctgacgtggccgccatcatcaacaacgtggacagatgcagacggctgagcaagtttggcgccgagcctagctgcatgatggtgtatggtgctagcggcgtgggcaagaccagcatcatccggaagtacctgaaggccaacgacaaggacagcaccgccagacaggatatcgtgcccgtggtgtacatcgagctgcccgagaatgccaagcctgtggatgccgctagagagctgctgctgtacctggaagatcccctggctctgtacgagagcgatctggccatcctgaccaagcggatcgtggatctggtgcccaccatgaagatcgagctgatcatcatcgacgagttccagcacctggtggaaaagagcagcaaccggatcctgagcagagtcggcgactggctgaagatgctgatcaacaagaccaagtgtcccgtgatcctgttcggcatgccctacagcaaagtggtgctggccgccaacacacagctgcggagcagattcagcatccagttcgagctgaagcccttctcctacatcaacaattacggaatctacgccggcttcctgcggagactggatgaggccctgcctttcgaccagctgagcaatctggcctctgagcctatcgccaagaagatctacgcctttagccagggcaacatgcggagcctgagaaacctggtgtttcacgccgccgtgaacgccatcgagaacgacaacaactgcatcagcaagaacgactgggagttcgccagcaacctgaccagcggcaacaagctgagcacatggaagaaccccttcgtgcagggcgtgaagatcaccgacagaatgctgcaggaccagcctaacgatctcggctgggaagattacatgcggaacaacaagggcaagcgcaagcccttcgacgagagcaagatcttcagctga

SEQ ID NO: 407 - DNA, 1179 bp, Artificial Sequence
  Synthetic
atgttcctgcagaggcctgagcctcactccgacgagagcctggaaagcttcttcatcagagtggccaacaacaacggctacgaggacatccaccggtttctgatcgtgaccaagagatacctgcaggacgagaaccacgacagattcgaggcctttcctaccgacatcaagaccatcaatccctacagcagcaagaacaaccacggcagcagagtggctgccctgcacaagattgccctgatgaccttcaacgagcagaccgagatcctgagcctggccatcaacagaaccagcctgatctacagccccagcaccacagctcttgtgcggggctctgaagtgatccccagaagcctgctgcggaagaacacaatcccttgctgccccagatgcctgtacgaggaaggctttggccactacctgtggcacttcaatggctacaaccactgccacaagcacaacgccctgctgacctacaagtgtgcctgtggcgccgactacgactacagaatcgccggcctgaatggcctgtgcagagagtgcgacacctatctgaaccccaaccagcagcagcctgacagcgccgagaacaagacatctgcttggctggccggcaagacaatcgagcagctgcctgatctgccccagtcctatagatggggcctgatccattggtgggcccatctgacccagaaagagtttgacggcgccagcttcatcgatttctggcacagatggcccgagagcttccaccacctgatccagcagaagatcgagttcaacctggaacacagcatcatccaccacgacaacctgaagctgaaggacctgctgggcgacctgttcttcagctgcatcagactgcccgagcggaacctgaagtacaacatcgtgctgaacgagctgctgcggttcatcgacaacaacctttggagagacaatggcctgctggccaatctgaagatgaacgccctggaagtgtccatcttcctgaactgcagccgcgagcagattgtgctgatggtggaccagcggttcctgaaaaccagccggaaggccaagcctaacaagcccctgagcttcaccgactacctgttccatctgggcgacgtgtactgtctgtggctggctgagttccagaccgacgagttcaatcggaccttcatcatcagcggctga

SEQ ID NO: 408 - DNA, 2496 bp, Artificial Sequence
  Synthetic
atgtacagacggcatctgcaccacagcagagtgaagaacctgttcaagttcgccagcgtgcggatgggcatcgtgctgacactggaaagcagcctggaattcgatacctgcttccagctcgagtacagccctgccgtgaaaacctacatcagccagcctgagggcttctactacgagttcgagggcaagagctacccctacacacccgactttctggtcaaggaccagaacgaccaagagttcctgctggaagtgaagcccagcagccagatcgacgatatcgacttcctgcagcggttccccgccaagcagaagaaggccaaagaactggcctctcctctgatcctgatcaccgagaagcagatcagaagcacccctctgctggacaacctgaagctggtgcacagatacgccggcttccacagcatcatgcccagctgcaacgagatcatggaactgctgcgcgagcagaaagaggtggccatcttcaacctgtgcgagagcatcgacatccctcagggcgagatgtacagcagcatcctgctgctgctgagcaggggcctgatcagcggcaatctgatggaaagcgagttcggcctggtcaccctgctgaaatacgcccagcagaacagcctgttcatctgcagcttcccattcgaggacgagttcaccctgagccaagagaacgaagtgaagatgagcaccgacgagtccagcgacatcatcctgcctgccacactggactgctacagcgagatcctgaaagaggaaagcgtccggcggctgaactacatccagtgggtcgagaagagaatcatcggcggctggaccgagaagaacatcaccccactgatcaacgaggtggcccagacactcagacctccagctcctcattggagacagctcgtgcggtggcacaagaagtacctgcagcacaggcggcagatcacagccctggtgcctaaccacaagaacaagggcaacaagacccagcgggtgtccagccgggaagagatcttcatcgagaacgccatcctgaagttccagagcaaagagcggcccagcatcagcagcatgtactgcttctactgcgactccgtgcggatcttcaatctgagcaacagcaccgagcggatcaagaccgtgtctctgaacaccttctaccgccggatcaaaaagctgagcgtgtaccaagtgatgaacgcccgcgacggaagagtggccgccaacatggaatttcaggccatcgacagctttctgcccacctccagagtgctggaaagagtggaaatcgaccacacacctctggacctgattctgctggatgacgagctgctcctgcctctgggtagaccttctctgacactgctgatcgacgtgtacagccactgcgccgtgggctttaacctgtgctttacccagcctggctacgagagcgtcagatgtgccctgctgcactctctcgtgcggaaggactatgtgcaagagcagtacccctgcatcgagaatagctggatcagctacggcaagcccgagacactggtggtggataacggcgccgagttttggtcctctagcctggaacacgcctgcctggaactgggcatcaacacccagtacaaccctgtgcggaagccctggctgaagcctctgatcgagagaatgttcggaacaatcaaccggaagttcctcgagtctatccccggcaagaccttcagcaacatcctggacaaggccgactacaaccctcagaaagacgccgtgatgcggttcagcgtgttcctggaaatcttccaccactggctgctcgatgtgtaccactacgagcccgacagccggtacagatacgttccagctctggcctggaagtacggctgcaaggtttaccctcctgccaccatcgagaagaatgagctgaagaagctggaaatcatcctgagcatcagcctgcggcggctgcatagaagaggcggaatccatctgcatcacctgagatacgactccaaagagctgtctgccctgcggatgcagtactccctggaagagaagggcaagaaaaaggtgctggtcaagctgaaccccgccgacatgagctacatctacgtgtacatcgacaagatcaagtcctacatccgggtgccatgcgtggacccctgcaagtacacacagaacctgagcctgcagcagcacctgatcaacctgcggttccaccgggacttcatcaacgagaacatcaacctggacagcctgagcaaggcccggatctacatctccgagagaatccagggcgaaatcgacaacgtgcggcagtacgccaagcggagcagcaagaaaggcatgaagaagatcgccagccatcagggcgtgaccagccagaacaagaaaacaatcgccagcgacaccattcacttccccgctcagaagggaaagaaccgggacacccacacactgcccgacgactgggatgacttcaccagcgacctggaacctttctga

SEQ ID NO: 409 - DNA, 1005 bp, Artificial Sequence
  Synthetic
atgaagctgagcagcctgaaagaggaaaagctgatctccttcatcaactgcttcgtcgagacacccttcctgaacgagatcgagaaggacttcgaccggctgcggtacaacagatttctcggcggagagccccagtgcatgctgctgacaggcgataccggaaccggcaagacctttctgctgcaccactacatgagcaagtaccccgctcagaacggcagcggctacctgagaaaacccctgctggtgtctcggatccccagcaagcctagcctggaaagcacaatggtggaactgctgaaggacctcggccagtggggcagcaactacagaagaaacagaagcagcgccgagaacctgaccgagagcctgatcaagtgcatgatgagatgcgagacagagctgatcctgatcgacgagttccaagagctgattgagaacaagaccagagagcggcggaaccagatcgccaaccggctgaagtacatcagcgagacagccagaattcccatcgtgctcgtgggaatgccttgggccgccaagatctctgaggaacctcagtggtccagcaggctgctgatcagaaagacaatcccctacttcaagctgaccgacggcctgagcatcttcgtgcgcgtgatcaagggattcgccgccagaatgcccttcagaaagcctcctgagatcgagggcaagcacaccatcctgggcctgtactctgctagccagggcagaatgcggaccctgaagttcctgctgaacgaggccgtgaagcaggccctgagcgaggattctgagacactgacacacgagcacatcggcaaggccttccacatcttctaccccgagcacgagaaccccttctacatccctctggaaaacatcaagatctacgaagtgcgcgagtactccggctatgagatcgacggcgctggcaaagaggatcggctgattcctcagcagctgacagacaggatccccatcaaccagctgctccggaagtga

SEQ ID NO: 410 - DNA, 1224 bp, Artificial Sequence
  Synthetic
atgcacttcctgatcagacccgagcctgtgtgcgacgagagcctggaaagctacctgctgagactgagccaggacaacggcttcgagcactacagaatcctgagcggcagcctgaaagagcggctgctgcagtctgattatgaggccgctggcgcctttcctctggaactggccaaagtgaacatcttccacgccagctacagctcctacctgcggatcagagccctgtgcctgatcgccgatctgacaggacagccccacaccaacctgctgaaagtgaccctgatgcacagcaccgtgaccttcggcagaggacacaaggccgtgtccagagacaacacacacatccctctgtgctttatccggaccaacagcatcccttgctgccctgagtgtctggccgagcatggctacgttagacagctgtggcactacaagccctacaccgcctgccaccggcacagaagaaagctgctgacaagatgccctgcctgccacgagtccctgaactacctgtacagcgaactgctgacccactgcagctgcggctacgatctgagacaggccttcacacctcctaccagcagcgacgatctgcagctgagcagcatggtgtccgacgacaagtgcgaagccctgtctcctgctagcgccagccaggataagagcctgagatatggcgccctgctgtggttcatcatgagatacggcgagagcagcaacaacgaggaaggcatgctgagcgccatgcactacttcagagcctggccagacaacttcaccgccgagctgctggatatgatggctgccgccaccatcaagcagaccaagagcttcaaccacatgagcctgaccgacgtgttcggcaagaccctgagcgactgtctgtacctgccagccagagacacccaccggaactttatcctgcacgcctttctggactacctgaccaacctggtcatggaaaaccccaggtccaatatcgccaatcctggcgacctgctgctgagcattagagatgccgcctgtctgctgtccaccagcaatgcccaggtgtacagactgctggacgacggctttctgaaggtggccatcagacctagagccggcatgaaagtgaagatcagcacccctgtgctgcatctgcggcaagtgatcgagttccggctgactcacatccccggacctcacgataagggccacacatacctgtccgccagatga

SEQ ID NO: 411 - DNA, 624 bp, Artificial Sequence
  Synthetic
atgttcgaccagaccaagaaaagcagccacgtgcacaacatctgcaagttcatgagcctgaagaacgacgccgtcgtgcggacactgtctatcctggaattcgacttctgcttccacctcgagtacaacgtggacgtggaaagcttcatcagccagcctaccggcttctactacaagttcaaccagcggcagtgccggtacacccctgactttctggccatcgatcagaacaagcagagcaccttcttcgaagtgaagcacagcagccagatcctgaagcctgacttccgggccagattcaaagaaaaacagaacgtgaccctgcaagagttcgaccggcggctgatcctggtcaccgagaagcagattagactgggccccgtgctgaccaacctgaagctgctgcacagatacagcggcatgcggaccatcaccaagttccagaaacaggtgctggcctacgtgcaaggcaaaggcatggtcaagctgcaagagatcgcccactacttcgagctgagcgaggccgaaacactggtggctacactgccttgggtgtcctctggacacgtgcagaccgattacaagagcgccggctttggcctggacacctacgtgtggtgttga

SEQ ID NO: 412 - DNA, 1866 bp, Artificial Sequence
  Synthetic
atgtctagccaggccgcctctatcctgggcttcttcgacgagtttgagaaggccgagaaggacagccagcagagcagcctggaattcttcgaggaaagccccgagatcaacctggccatcgacggctactgtgacgaagtgcggaaagagctgatccggcggctgaaggtgttcaactacgtggaaaagcggctgagaggcggctggaccgagaagaacctggaacctatcctgagcagcgtggaaagcgacctggaactgcctgctcctaagtggcggacactcgtgtgctggaagaagatctacctggaaagcggcagggacccctactctctgatccccaagcacctcctgaagggcaaccgcgagaaagtgatcgacagccaagtgatcgtggacgaggccatcaccaaggtgtacctgaccagagaaagactgagcgtggccgaggcctaccggtactatacagctagagtggtgcagctgaatcggttcatcatcgagggcaagatcaagcccgtgtccgagcggaccttctacaaccggatcaaggacctgcctccttacgaagtggacgtggccagattcggcaagagatacgccgacagacagtacagagccgtgggccagcagatcattgccaccaagcctatggaatacgtcgagatcgatcacacccctgtgcctgtgatcctgatcgacgacgagctggacatccctctgggcagaccctacctgacaatgctgtacgaccggttcagcaagtgcattgtgggcctgagcgtgaacttcagagagcccagctttgacagcgtgcggaaggccctgctgaacagcctgctggataagagctggatcagacagaaataccccatgatcaagaacgactggccctgccacggcaagatcgattgcctggtggtggataacggcgccgagttctggtctaagagcctggaagatagcctgcggcctctggtgtccgacatccagtattctcaggccgccaagccttggagaaagagcggcatcgagaagctgttcgaccagctgaacaagggcctgaacaacgcctttcctggcaagaccttcacaaaccccacacagctgcacgactacgaccccaagaaagacgccgtcgtcagagtgtccgtgttcctcgagctgctgcacatctgggtcgtcgacttctaccacatgaagtccgacagcagagagcgggctatcccctaccacaagtggcagcagtctcagtgggtgcccagccactatgatggcgaggaagccgagaaactgaaggtggaactgggcctgctgcggcacagatctatcggaatcgccggcatcagactgcacaacctgagataccagagcaacgagctgatcgagtaccggaagtaccacagcaccaagagcaatgagaaactgttcgtgcggaccaagacagaccccagcgacatctctcacatccatgtgtatctggaaccccagaaaaagtacatcaaggtgcccgccgtggacaacagcggctatacaaagggcctgtctctgttcgagcacgagcggatccagaaggtgctgcggctgaacacaagagagctggccaacgaagaggccctggccgacacctttatgtacatgaagaaccggatccagggcgagacagacagactgtccgccagcaagaagaagaagcctcggctgcccaagaccagcaacaccagcaaactggccaagttccaggacgtgggcagcgacggccctaatagcatcaccaccaagatcaacgagggccccgtggtcatggactgcctggatgatacccagctgattgacgatgacttcgagaacgtggaaggctactga

SEQ ID NO: 413 - DNA, 1062 bp, Artificial Sequence
  Synthetic
atgaacctgaccagctgccagatcgagcggctgaaggcctttgagacatgcttcatcgagtaccccgccatcaccgagatctacagcatcttcgaccagctgaggttcaatcagaccctcggcggagagcctgagagctttctgcttactggcgaggccggctctggaaagacagccctgatcaagaactacctgagcagattcgacgtgggcagcacctgggatagacagcctgtgctgagcaccagagtgcccagcagaatcaacgagcagaacatgctgagccagttctgcgtggacctgaacgtgaagctcggcggcagaagctctagacagagaggcggaattgccctgggcgaagcccttgtgaagcagctgaagagaaagagcgtggaactgatcatcgtgaacgagatccaagagctggtggaattcagcacagcccaagagcggcagacaatcgccaacacactgaagtacatcagcgaggaagccagcctgagcttcgtgctcgtgggaatgccttacgccgaagtgatcgtgaatgagccccagtggaacagcagactgagctggcggagaaagatcgactacttcaagctgctgaaagtgaaccagagcatgaagtctgcccctcggtacagcttcgacctggaacagaagaagcacttcgccagattcgtggccggcctggccatgagaatgggctttgaggaacctcctaagctggccaagaacgagacactgttccctctgttcgtggcctgcagaggcgagtgcagacggctgaagcactttctgaaggacgccctggtcatgagcttcaccatgaaggccaacaccatcaacagagccctgctgagcgccaccttcagcctgaagtttcccgagctggctaaccccttcgactgccaagccgaggatctggacatccaccagatcgaaaccagcagcagctacaacctgcaggctaccaccagcgaggacaagattctggcccctagattcaccgacgccattcctctgaatatgctgctgagcaagaacgccctgagagtgtga

SEQ ID NO: 414 - DNA, 1212 bp, Artificial Sequence
  Synthetic
atgaacaacggcatcgagtactacgaggacgagagcctggaatccatgctgctgagactgtctcacgccctgggctacgagagattcagccactttgccgaggacctgtggctggaaaccgtggatgaacacggcgctatcagcggcgcctttccatttgagctgacccatgtgaacgtgtaccacgctcagaccaccagccagatgagagtcagagtgctgctggccctggaaaagaagctgaagctgagcagcctgggcatcctgagatttgccctgagccacagcaaggcccagttcagccctgattacaaggccgtgcacagattcggcagcgactacccttacgccttcctgcggaagcggtttacccctatctgccctctgtgcatcagcgacaccccttacatcagacagcagtggcagttcatcagccaccaggcctgtgaacaccacggctgcaaactggtgcatcagtgccctgagtgccagagcaagctggaataccagatcaccgagagcatcaaccagtgcgagtgcggcttcgagctgagaaactctcctgtggaaggcgcccctgaggccgctcttatagttgccagatggctgagcggctccgacctgaagtctctgggcagcctgaaagaagagatgaccctgagcgagagatacggcttcctgctttggtacgtgaacagatacggcgacatcgacgacctgagcttcgagagcttcgtggcctactgctgcagctggcctacactgctgtggcaggatctggacgtgctgaaagaaaaggccaagctggtgcaagtgaaagaatggaacaaggtgttcttccacgaggtgttcggcaccctgctgaaggactgtagacagctgcctagcagacagctgagccagaacaacgtgctgacacaggtgctggcctatttcaccgagctgatgacagccgtgccaagcagcaccaagggcaacttcggcaatatcctgctgagccctctggaagtgtccacactgctgagctgcaccaccgacgaggtgtacagactgtacgagttcggcgagatcaaggccgccatcagacccagaatgcacaccaagatcgccagccacgagagcgccttcacactgagaagcgtgatcgagacaaagatcgcccggatgagcagcgagtccgatggcctgtctgtgtacctgcctgagtggtga

SEQ ID NO: 415 - DNA, 690 bp, Artificial Sequence
  Synthetic
atgtctgccctgccttctcctagcaccaccacactgatcgccctggaaagcgcctttgtgacccctgccagaaacctgaccaagagccggggcaagaacatccacagatacgtgtccgccaagatgggcaagcgcgtgaccgtggaaagcttcctggaatgcgtggcctgctaccacttcgacttcgagcctagcatcgtgcggttctgcagccagcctatcagattcagctacggcctgaacggcaagacccatacctacgtgcccgacttcctggtgcagttcgataccggcgagttcaagctgtacgaagtgaagtccgacatggaaagcagcaaagaggaattccagtgcgagtgggaagccaaggtgcagggcgcctttgaactgggactcgagctggaactggtcaccgaggaagagatcctggacgaagtgatcttcagcaacctgaagctgctgcaccgctacgccagcagagacaacctgaaccacttccaccagacactgctggccaccttcaagctgaatggcacccagacagccaagtctctgggacaccacctgggcctgaatggccggaagatcctgcctttcctgtgcgacctgctgagccggaatctgctgcagacaagcctggaaacccctctgtctctggaatccgagttcgagctgggctgctacgcttga

SEQ ID NO: 416 - DNA, 1812 bp, Artificial Sequence
  Synthetic
atgcccaacaagagcttcagcagcttccacagaaagagcgccttccagcaagagaagctggaacccaacgacagagtggtggacgacaacgatgtggacgaggccacctaccaggacatcagcgcctttccagacaatatcgccacacagatcaccttccggctgagcatcctgagatacctggccagcaagtgcgagcggatcatccccaagacaatcgagcctcacagagtgggcctgcagagactgcacgacagaaagatccctagcgccatcagcatctaccggtggtggctggtgtttagagccagcggctgcaaccctgtgtctctggcccctaagaacaagaacaagggcaacagcaaggccaaggtgcccacctttgtggacgccctgatggaacaggccgtggacagagtgatcagcggccggaaagtgcggatcagatctgcctacagaagagtgcggcggaagctgagacagcacaacctgaacaacggcaccaagtacaagtaccccacctacgagagcctgcgcaagagagtgaagaagaaaacccctttcgagctgctggccgccaagaaaggcgagagagtggccaagcgcgagttcagaagaatgggcaagaagatcctgaccagctacgtgctggaacgcgtggaaatcgaccacaccgtggtggatctgttcgccgtgcacgaggaacacagagtgcctcttggtagaccctggctgacccagctggtggactgttactctaaggccgtgatcggcttctacctgggcttcgagcctcctagctacgtgtcagtcagcctggctctgaagaacgccatcctgaggaaggacgacctgctgagcagcttcgactccgtggaaaacgagtggctgtgctacggcatccccgatctgctggtcaccgacaacggcaaagagttcctgagcaaggccttcgacaaggcctgcgagtccctgctgatcaacgtgcaccagaacagagtggaaacccctgacgacaagccccacgtggaaagaagctacggcaccatcaataccagcctgctggacgatctgcccggaaaggccttcagccagtatctgcagagagaaggctacgacagcgtgggcgaagccacactgacactggacgagatcaaagagatctacctgatctggctggtcgacatctatcaccccaagagcaaccagcggggcaccaactgtcctaacgtggcatggaagaggggctgccaagagtgggagcccgaggaattcaacggcagcaaggacgagctggacttcaagttcgccatcgtggaccagaagcagctgacaaaggctggcgtgaccgtgtacaaagagctgacctacagcagcgagaggctggccgagtacagaggcaaaaagggcaaccacaaggtgcagttcaagtacaaccccgagtgcatggccgtgatttgggtgctcgacgaggacctgaacgagtactttaccgtgcacgccatcgactacgagtacgccagcagagtgtctctgtggcagcacaagtacaatatgaagtaccaggccgagctgaacagcgccgagtacgatgaggacaaagagattgacgccgagatcaagatcgaggaaatcgccgaccggtccatcgtcaagacaaagaagatcagggccagaagaagaggcgccagacaccaagagaatagcgccagagccaagagcatcagcgacgccaaacctgtgcctagccagaagcacgaggacgagattgtgatcgtggacaacgaggactgggacatcgattacgtgtga

SEQ ID NO: 417 - DNA, 990 bp, Artificial Sequence
  Synthetic
atgaacgagacaagagaggcccggatcagcaaggccaagagggcctttgtgtctacccctagcgtgaccaagatcctgtgctacatggaccggtgcagggacctgagcgacttcgattctgagcctacctgcatgatggtgtacggcgcttctggcgtgggcaagaccaccatcatcaagaagtacctgaaccagaaccggcgggactctgaagtcggcggcgatatcattcccgtgctgcacatcgagctgcccgacaatgccaagcctgttgacgccgctagagaactgctggtggaaatgggcgatcccctggctctgtacgagacagacctggccagactgaccaagaagctgatcgatctgatccccgtcgtgggcgtgaagctgattatcatcgacgagttccagcacctggtggaagaacggtccaaccgggtgctgacccaagtcggcaattggctgaagatgatcctgaacaagaccaagtgtcccatcgtgctgttcggcatgccctacagcaaagtggtgctgcaggccaactctcagctgcacggcagattcagcatccagttcgagctgcggcccttcagctatcaaggcggagagggcgtgttcaagaccttcctggaatacctggacaaggccctgcctttcgagaagcaggccggactggccaatgagagcctgcagaagaagctgtacgccttcagccagggcaacatgcggagcctgagaaacctgatctaccaggccagcatcgaggccatcgacaatcagcacgccaccatcaccgaagaggacttcgtgttcgccagcaagctgaccagcggcgacaagcctatcacctggaagaaccccttcgacgagggcgtgaaagtgaccgaggatatgctgcggcctcctccaaaggatatcggctgggaagattactaccacaacgtgaagcccaagaaccagcggagaaagggcagcaacatgttcgagtga

SEQ ID NO: 418 - DNA, 1215 bp, Artificial Sequence
  Synthetic
atgcaggtttccggcatcctgatgaagaccatgctgctgcagcggcccaagcctttcgaggatgagagcctggaaagctacctgatcagaatcgccaaccggaacggctaccaggacgtggacagatttctgagcgccctgaagcactacctgtgcgacggcgatagcgagaagttcagcagcttccccaccgacatcagacggatcaacccctacagcagcaagcacagctctgccgccagatctcacgccctgcacaagatcggacagctgacctttaccgagagcgtggacctgctgaagctggctatcaacagaagccctctgaagtacagccccagcgtgaccgccgtgattagaggccatgaggtgttccccagaagcctgctgcggaccaacatcatccctgtgtgccccgtgtgcctgcaagagaatggctacgccagctacctgtggcacttcgagggctacgactactgccacatccacgatctggccctgacctacaattgccagtgcggcaagccctgcgactacagagtttctggactgcagctcgtgtgcagctcctgcggcacaacactgacccatctgctggaaaagcccaccgatcggagcagcgatatctctcattggctggccggcgagacaatcaagtggcttcctgctgtgcccgtgtcctacagatggggacttgtgcactggtggatgaacaacaagaagtccaaagagctggaaaccgagagcttcaccatcttttggaagaactggcccaacagcttccacaacctgatccaagagacactgagctacaaccagacctacagcctggtggcccctacacagtggcggctgaaagatctgctgggcgagatcctgttcagctccatcaacctgcctggccgcaacctgcagtacaatctgatcctgagagagctgttccactacctggaaaaccacctgtgggagaacaacggcctgatcgccaatctgagactgagcgcctttgaggtgtccctgatcctgggctgtagcaccgaagaggtggccagcatgtctgagcagggactgctgatccccatccagaaccggaagagatacgagcccatgagcctgaccaactgcatcttccacttcggcgacgtgttctgcatctggctggctgagttccagaccgacgagttcaaccggtccttctacaccagccggtggtga

SEQ ID NO: 419 - DNA, 630 bp, Artificial Sequence
  Synthetic
atgtacaccagaacactgcggccctctccagtgaagcacatctacaagttcgccagccacaagaacggcaacgtgcagaccgtggaaagcagcctggaattcaacgcctgcttccacttcgagtacgccaacgaagtgcggagctttgtggcccagcctgagggcttctactaccagttcgaggaccggacctgcagctacacccctgacttcgagctgttctgccacagcggcaagaaagtgttcgtggaaatcaagcctcctccagaggctctgaagcacgacttcatccagcggttcaccgccaagaaaaaggccgtggaaatgctgggcaaagagctgatcctggtcaccgaccaccagatcagcagcatgcccaagctgaagaacctgaagctgatcaacagatacgccggcctgtacaccgaggtggtgtcccggaagaagatctacgagctgattaagaagtcccacggcctgtctatcgccgacatctctgaactgtgtggcgccgattctgccgaggtgctggtggatgttatgtggctggtggcctctggcaaggtgctgatcaatatcgacgagacattcggctgcgagagcctgatctgggttggaggcggacagtaa

SEQ ID NO: 420 - DNA, 1884 bp, Artificial Sequence
  Synthetic
atgagcatcgagttcttcagcgacgagttccccggctttcagtctggcgaagcttctgccgtggtggacggccagtacatcaatgtgcctgagcggctgagctacatcagcttcgacagcctgagcaagagcgtgcaagaggaagcctactacaagtacaaagtgatcgtgctggtcaaagagcatctgcaaggcggctggaccaagaagaacatcgaccccatcctggacagcctgttcgagcagggacacatcgagaagaagcctagctggcgctctgtggccagatggcacaagaactacgaccaagtgatcggccccaagagcctggtgtctgccaaaggcctggtcaagaaccccggcaacagcaagagagatgacgccgacttctacaagagagccgtggaagagaagttcctgaagcgcgagaggcctcacgtgtccaccgcctactaccactacttcaacaacatcctgctgtacaaccgggctcaccccgacaatgccatcgagcctatcaccaagagcgccttttacaagcgcgtgaagaagatcagcccctacgaggtggaagtgggcagatttggaaaggccgaggccgacaaggactaccgggtcgtgaacaagttttctgccgccgagcgcgtgatggaaagagtggaaatcgatcacacccctctggacctgatcctgctggacgataccctgctgatccccatcggcagaccctacctgaccatcctgatcgactgccacagccggtgcatcatcggcttctacctgagcttccaagagccaagctacaacagcgtgcggagcgccatcatgaatgcctgcctgtccaaagaagatgtggccaagaaataccccatgatcaagaagaattggccctgccagggcaagatcgagacactggtggtggataacggcgccgagttctggtccaagaatctggaattcttctgcgccagcgtgggcatcaatatcgagttcaaccccgtgggcaagccctggaagaaacccctggtggaacggctgttcagcatctacaactcccgcttcgtgaaagagatccccggcaccaccttcagcaatgcccaacagctggccggctacaagcctgagaaggatgccatcctgcctttcagctacttcatcgagctgatgcacatctggatcatcgacatctacaatcagagccccgacagccggatgacaagaatccctgctctgagctgggagatcggctgcaagaagtaccctccacctctgtacagcggcttcgaggaaaagatcttcaagattgaggctttccccaccgagctgtgcaccctgagaagaggcggcatctccatcgaccggatcgactacaccaacgaggaactggtggaataccggaagatcaccccacctccacctggcagcaaggtggtcaaagtggtggtcaagagggaccccgaggacgtgtcctacatctacgtgtacctggtcgagcggaaagagtacatcagagtccccgccgtggatcccgacagactgtatgatggcctgagcgtgttccagctgaaagtgcggcggaagctgcggagaaacttcatcaactccaagaccgactacgtgggaatcgccgaagccgagaagctgatcgacgacagagtgtccgagatcgccgaggaagtgtctgcctccaagaaaaagatcaagggcaccaagaaggccgctgcctacttcggcatcagcagcgagaatcccagcagcatcgtggacggcttcaccagcagagagatcagcgatatcgagaaagagaacaagagccacagcggcgtgaaccccaacgacgaggaatggaagcggatctccgacgacctggaaccttacagctga

SEQ ID NO: 421 - DNA, 1020 bp, Artificial Sequence
  Synthetic
atgaacatgctgatgagcaacgagaagctcgagcagcagatctacttcaagaactgctacgtgaagcacagcagcgtggccagagccatcagcagcctggaaatcctgaaggccaatcacgccctcggcggagagcaacagtgcatgctgatcatcggcgatcctggcagcggcaagagcagactggtgcaagagttccagtctcagtaccccgagtacgtggaaaacgacaccgtgatcaagcccgtgctggtgtctagaatccccagcaagcccgacgtggaatctatgctgatccagctgatgatggacctgggccagtttggcgccgacaccagaagagagagaagaagagaggccggactggccgaggctctggtcaagatgctgaagaaatgcaagagcgagatgatcattatcaacgagttccaagagctgatcgagttcaagtccgtggaagagaagcagcggatcgccaacatcctgaagctcgtgaacgagaaggccggcattcccatcgtgcttgtgggcatgccttgggccgctgagatcctgaatgaacctcagtgggccagcagactgatgtgcaccatcgagctgccttacttcaagttcttcaacctcgaggaccggatcgagtttacccggttcatcaaaggcctggccagcaagatgggcttcaagaaggcccctagcattcacgtggacgagatcctgtttcctctgttcagcgtgaccaggggcgagacacggcaagtgaagagagtgctggaagccgctctgtgtgtggccctgagcaagaacgatagcaccgtgcggagacagcacttcctggaagcctgcgataagttcttcctgggcgccgataatcccttcgagctggaactggaagatgtgcccatcagcgaggtgtccaagtacagcagctacaaccggtacagcaccgtggaaagcgagacattcgtggccacacagttcacccggaagatcagcaccagagagctgttcagcaagaactga

SEQ ID NO: 422 - DNA, 1239 bp, Artificial Sequence
  Synthetic
atgaagctgctcgtgcggccctctccattcatcaacgagagcctggaaagctacatgctgcggctgagccaagagaacttcttcgagtactaccagcagctgagccgggccatcaaggattggctgcaactgcacgatcacgaggccgctggtgcctttcctgaggaactgagcagactgaacgtgtaccacgccgctcagagcagcagcagaagaatcagagccctgaagctggtggaaagcctgaccgacaacgagaagctgcctctgctgcacctggccgtgatccacagcagcgagaagttctgcagccggtacaccagcgtgttctacggcggaacacacgtgccaagagcacttgtgcggcagaaatctatccctgtgtgccccgattgtctgagcgaggccaactacatccggcaagagtggcactggatgccctacgaggcctgcatcaatcacggcaagcagatgctgcacgagtgccccaagtgcgaggaaaagctgaactacaccgacagcgagtgcctgcacacctgtagatgcggcttcgacctgagaaacgccgatagcgagcctgccgatgagtggcagctgatcgcctctagactggttgtgggcgagcacagccctagcagacatcctctgctggacatcagaagcgtgtccctgagactggcctgcctgctctggtatcagctgtacgtgcacaagaccctggacgcctgcgatcaggtgtccaccagaacaatcgagcaggccatcgagtacttcacccactggcctgaggtgttcaccaaagaactggaagaacaggtgtccctgtccggcgacaagctgatctgcgactacaacaagaccagcttccgggacgtgttcggcaacatcgtgggcatcagtcggctgctgctgaaggcttaccccgagaacgacttcgtgctgacccctctggaaaacttcctggccagactggtggaccagaatcctcagaccagagtgcccaacgtggccgacctgctgatctctatgcctgaggccgctatcctgctgggcacatcttatgagcaggcctaccggctgtacgaagagggctatctgaaatgcgccgtgcggctgaagtcccacgagaaactggttaacggcatcggagtgttctacctgcgggaagtgatggaactgcggcagagcagaatgcccattgagacaggcgcctacaacaactacctgccagcctggtaa

SEQ ID NO: 423 - DNA, 624 bp, Artificial Sequence
  Synthetic
atgtacaaccggaacctgcggaagccctctccaaacaagaacatctacaagttcgtgtcccggaagaaccggtccaccatcatgtgtgaaagcggcctggaattcgacgcctgcttccacctggaattttccccattcattgccagcttcgagagccagcctaccggcatcgaatatcaggccgacaacaaagtgcggcggtacacccctgacttcaagatcgtgaaggacaccggcgagatcgagtacatcgagatcaagcccgagcagatccacagcacccagaagttccgggaagagttcgagtgcaagagggccgcctataacaccctgggctacaagctgatcctggtgtccgagaagcagatccggaacgacaacctgctggccaacctgaaggtgctgcacagatacgccagcagcagcctgtctgagctgcacaagctggtgctgcatcacatcaagagcgccaagagcctgagcatccggcagctggctaacaagctggacctgctgatcggcgattgcattgccgcctgtgccatgctgattggcatcggcatgatcaaggtggacctggaagtggaactgctgtgcgagcacagcctgctgaatgaggcttga

SEQ ID NO: 424 - DNA, 1830 bp, Artificial Sequence
  Synthetic
atgttcgacgacgagttcgaggaccagatcatcagcgaggacaccagcgaccagcatctgcagaccaacgatcccatcttcttcagcagcgacctgggcagctactccgaggacattagccaagaggccaccgccaaatacgagctggtcatcttcctgcggagcagactgacaggcggctggacccagaagaacatcgaccctctgttcgatgagtacttcagccagaaccggctgatcaccatgcctagttggagaacagccgtgcggtggcacaagaaactgctggaacagtgtgatgccctggtggccctgatcgacagacacgactgcaagggcaacagaaacaagaagctgcacctggaccacgacaacatcatcgaggtgcccaacgacctgttcctgaaggccaagcggccttctatcgctggcgcctaccggtactacaaggacaagtgcctgctgcgggaccagtctaaaggcggcggaatcagacccatgagccagagagccttctacgaccggatctacaagcagaacagctacgagatgaccgccaagcggagaggcaagtacaaggccgacatgaagttcggctacaaaggcggcatcatcaagcccgagcgcgtgatgcagagagtggaaatcgatcacacccctctggacatcatcctgctggacgatggcaccggcaagcctatcggcaagccatttctgaccctgctgaaggacgtgtacagcggctgtctcgtgggctaccacctgacctttaaggcccctagctatgcctctgtggccaaggccatctgccacacactgctgcctaagagccagagccaagagctgtggggaatcgagtggccctgcaacggaaagattgaggtgctggtggtggacaacggcgccgagttttggagcaagagcctcgagcagatgtgcctggaactgggcatcaacatccagtacaaccccgtgcgacagccttggctgaagcccttcatcgagcggaacttccggtccatcaacgatctgctgctggatgagcaggacggcaagaccttcagatccctggatgtgcgggacgagtacgacagcgtgaaagaagccaccatcaagttcagcaacttcgtgcacggcttcgagaagtggatggccgaggtgtacaactgcagctccgatagcagaggcctgagagtgcctagcctgctgtggcaagagggcttcgataagctgcctcctgccaagctgaacgagcaggatgccatcgatctgcccaagatcgccggcctgaagaaaaccagaacactgcagcctagcggcatcacccacgagctgctgagatacgattctgaggccctgagcgactacagaaagagctgttggagccccgaccagcggaagaaagtgatcatcaaggtggacatcgacgacgtgtccaagatctacgtgtacctgagcgagctgaacacctacctgaccgtgccttgcgtggacaaggtgtacacatacaacctgagcctggatcagcacctgatcaacaagagcctgaccagggccaagaacctgctgcacggcaagagcgataaggatctggccgccagccgggaagagatcagagaagttctggccggacacgacgccaacgtgaaaaccagcaccaaagtgaccaccaacaagaaggcagcccagtacaagggctacagcagcgagacagtgcggaatgccggcaatgccgataagggcctgtctacccacgagggcaagaccagcgattccagcgagaacatctccgacctggaagccctgtggcagagcttcaacaaggactga

SEQ ID NO: 425 - DNA, 1005 bp, Artificial Sequence
  Synthetic
atgagcctgaccgacgccaacaagagcaagatccggaccttcaaggacagcttctgcctgtacacccctgtgcgggaagtgctggccgatctggaaagcctgtatcagtctgccgagatcggcggcgatcagctgtctatgctgctgtgtggcgataccggcacaggcaagtctgccctgatccggtacttcagcgagacaaagaaccagaaccagagcgagagcctgcctatcctgctgagcagagtgcctagcaagctgaccgtggaagataccaccagacagctgctgtgcgacctgggagtgtttggcagcagcagccaccggtacaagaacacacagtctgacgcccacctgacctccagactgctggatgccctgagagtgaagaacaccaagctgatcatcatcaacgagttccaagagctgatcgagttcaagggcgccagagacagacaggccatcggcaacagactgaagctgatctctgaagaggccggcgtgccaatcgtgctggctggaatgccttggatcgacgagatcctgaacgacagccagtgggcctctagactggccaccagaaggcacaccctgaactacctgagcctgagcaagcggcccaaagagtacaacgagctgctgaagctgctggaacagagcatcccctgcgaggtggaaaactccctgaccgagttcgagatcagcctgtctctgttcgccgccagctgtggcgaaatcaggcagctgaaagccctgctgaccgaggccattaagctgtgcctgatcagcagcaagcccctgtccaagcagagcctgtccgacagcttcaagaatctgtaccccggcaacgagaaccccttcgacctgcctaaagagaagatcaagatcagggaagtcgagatgcacagccagtacatcagaggcgacagctcccacagagccagcatcgaacctcggagactgagcgaagtgatgaccctgacacagatcctgtctaagaagtga

SEQ ID NO: 426 - DNA, 1152 bp, Artificial Sequence
  Synthetic
atgagcttcctgcctaacagcatcgacctgtacgaggacgaggccctggaatctgctctgctgagactgtgcagagtgaaccacttcgagcactacagcgacctgagcatcgaagtgaagtcctggctggaagagagacaccccacaattgccggcgctttcccactgtctctggacgccgtgaatatctaccacgccaagcagtctagcgcccagagagtgcaggccatccagctgctggaacagctcgtgggcctgtccagattcagcctgctggacatctgcttcaagcacaccaccgccgtggatctgggccagtatgctgaagtgcggtacaagcagatcaatatccccagagaattcctgcggagcacgatcatccctatctgccccgagtgcctgaacgagagcaactacgtcagattcgactggcacatcaacaaggtggaatgctgcgagaagcacggcatcaagctgctgagaaactgccccagctgtcacatccctctgaactacatgaacagcgaggaccccggcagatgtatctgcggcctgaacctgctgcagaacagccacagagagttcggcttcgacagctggcgggatcactctctgtatgaggccatcggcagctgcagcctgtctgaaaaactggccgtgctggtgttcagcgacaagttctttcccctgctggcctacgaggacttcatcgtggatcccagacggcacatcgacgagtacctgaatggcctgatcgagcagaatctgctgctggccaccgagaagcccaacagactgagctttgcccagatcagcaacgacttcctggacgacatcagcgccatcagctgcctgcctctgaagatcaaagaattcattgctggcgtggtcatcaccctggccatcaacgaggaaagaagcacaatcgccaacatcggcgacaccctggtgtctgccagagaagccgccgtgatcatcggctccgagctggacgatatctaccggctgtacgagagcggcatcctggtcgttggaagaaggctgaggaacgagggcaagctggaatctcacaaccccgtgttccggctgagagatgtggcatctctggccctgagctacagcaagtaccagttcagccagagcgcctggtga

SEQ ID NO: 427 - DNA, 669 bp, Artificial Sequence
  Synthetic
atgtgcaaggacgacgagaacagaggcagacgggacgtgaagaaactgatgagccggtccatcaacgtgttccccgccaagaagtccctggacgagacaacctttaccgagggcaccctggaagccgacctgtgctactacctggaattcgaccccaaggtggtgtcctaccagcctcagcctcactgcatcaagtactttctgaacgatgagaagcactgctacaccgccgacctgctggtcaactacttcgacggcaagaagcggctgatcgagatcaagtacaaccgggacatcgaccggatcagcgacttcgacgattggcggctggccatcaagaccgcctgtgaatctcagggcttcgagttcgaggtgctgaccgaggacgagatcagaaagcagcccctgtacgagaatctgaccctgctgtgggccagccacgataaggctctggataagggcttcctggtcaaagtgatcaacaccctggaccagaacgacgacgtgctgatctccgatctgctgcccaaagtgaacttcgacagcgagctggaacaggtgtacaagctgatcttcgaccggaagattctggcccctatcgataccgagttcctgagcacccagaccagcatcaagcacagcggcgagagctacgagtgctacctgtaa

SEQ ID NO: 428 - DNA, 2007 bp, Artificial Sequence
  Synthetic
atgaacgccacctacgagacaggcgacttcatcaccatcaagaaccacgacgtgtcccaccagtacgagatcatctacagcagccccgacatcatcaagctgatcgattccttcagcggaatcgccagcaccagaaagagcagagagctggacgagctgatcgtgtccgggatcgccatcatccaccagaaggacctgcggaccagaaagctgctggaaaacaacgtgatcgacttcgccagctttcccgaagagagcaagcagaaggcccgcgagcggtacatctttgtgtccggcatcctggaacagaacctgaagtctcacagcggcaccatcctgaagcctatcgtggaacagatctacaacgccaacagcttcaccacgctgaccaagaaacctggcgtgcggacagtgcagtactggctgaagtccttcagggacgccaactgcagcatcagagccctgctgcctatccaccacgccaagggcaacagaaacgtgaagctggatgagatcaaagagccctatatcgccgctgccatcgagtacttcaagacccctgagaggcccagcatcagcagcgcctacgactacctgaaaaccctgatcaactacgacaacaagatcctgagcaagagcgagaagatcaaggtgcccagcctgagcgccttcatcaagagactggaaaagttcgccaagaacgagatcttcgccgccagactgggcaaagacgaggcccggaagagattcaagctgaaccagctgagccaagagatcaagttcatcctgcagcgcgtggaagtggatcacacccaggccgatctgttcatcgtggacagcaagctgagcatgatcctgggcagaccctacatcaccgtgctgctggactacaagagcaagtccatcctgggcttctacatcggcttcgagaagccctcctacctgtccgtggctagagccctgaagcacagcatcctgcctaagacctatctgaaagaactgtaccccgaggtggaaagcgagtgggactgttacggcatccccaagacactggccgtggacagaggcaaggatttcgagtctgtggccctgatcgacgcctgccacgacctgaacatccggatcgagagaaaccccgctaagcacccctggtacaagggcagcgtggaaagcttcttcaagagcatcaacaccaagctgttcgacgacatgaagggcaaagtgttccccgacattgtggacaccaacctgtacaaccctcaagagcacgccgtgattaccatggacctgtttctgaaactgtttcacgtgtggatcgtggacgtgtaccagcaggatctggtgtccaagggcacaatcatccccagagtgtcctggcaagaggacctgaaatctgtgcctcggagagtgatgaacaaggacgacctggatatcgtgctgagcgagacaaccgaccggaagaattctcctgccggcatcgtgttcgaccacatttggtacgacaacgacgagctgctgaagtatcggagcgaagtgggcttcaccaaagtgaccatgaagtacaaccgcgaggatctgggcttcatctacgtgctggacgaacggaaccccagctacaagcactactttaaggtgcccgccgtggaccagaagtatgccaagggactgtctctgcaccagcaccaagtgatcaaggccttcaacaagaacaagctgcagcaagagcacaataccgagaacctggctgccgccaagatgaagatcatgcagctgatctccaacttcctggacagcgccagcagcaagaagatcagctccagccagaaactgagccgcttcatgaacgtgggccagcagaccgaccagaccgtgaagtctagcgtgaccgacatcagcacacagatccccaccgtgcaagagatccacagcgacaccgaggaatccaacgaggtgctggaaatctacgacgggatccacaacagcctgcctgacaagctgaatttctga

SEQ ID NO: 429 - DNA, 1032 bp, Artificial Sequence
  Synthetic
atgaagcagaaagaggacgacctgatcgagagcctgatcttcttcgtgcccaccgacagcctggaaaagaccctgatcgccctgaaggacatcagagagtacagcaagatccacaactaccgggtgccacctaagtgcatgctgctgacaggcgaaacaggcgtgggcaagaccttcttcatcgagcagtacctggaatctcaccccagctacgacgtgtcctgcgacgatggcgagaaaaccatcgtgcccgtgctgtactgccagctgcctaaggctaagcaccccaagcctgtggtgtctcagctgctgtctaagctgggcgaccctctgaagaggcctaaaggggatgtgcgggaactgacccagagcctggtgtacctgctgaaagaagtgaaaaccgagctgatcatcgtggacgaggtgcagcacgccatcgaaaccaccaacaagaacgtgatccaagagatcggcgagtggttcaagatcctgatcaacgagagcagaatccctatcgtgctcgtgggcgtgccatgggccaaacctgtgatcgatgtgaacgcccagctgcggagaagagtgcgctaccacttcgagctgagcaactacaccctgaagaacttcaacaagttccagatgttcctgcagaacgtgcagaagaaactgcccctgaacgtgtacagaaccctgtgggaagtcgagatggccttcagactgtttgccgccagccacggcaatatcagcgagctgatggacggcacaatcatccccgcctgcgagaatgccatcctgcagggcaaaagcgtggtggaagagagcaatttcatcgaggccgtgaacgagaacgccaacttcaaagagaagaaccccttcagcatcaagagcgtgcgggacgtgatcgcctaccagcagaaaaccagcagcaagttcaagaagaatgccaagcgcaaagaggaacggatcgtcgacgccatctacaccaagatcaagttcgacgatctgaagctgagcgaggtgctgagcaagaagtga

SEQ ID NO: 430 - DNA, 1188 bp, Artificial Sequence
  Synthetic
atgaagttcctgaagcggatcaagctgttccccgacgaggccctggaaagctacttcatcagatgcgcccacagcaacggcttccagaagatcagcctgttcctgcagagcctgagcgccttcatcagcctgagagacaaagagctgaaaggcgccctgtctgccagcctgtccagactgaatctgcacaaggcccacaacagcagcgcctatagagtgcgggccatcaagctgctggaagagttctgcgatctgcagcccagctgcctgctgagagttgccgtgctgaggaccaacagacacttcggcagctatgtggccctggccagatccaacgtgctgttccctaacatcatgctgcgcgagcacgtgatccctgtgtgccctctgtgtctgcaagagcggaactacatccggttcatctggcacctgaagcctatccagagatgccccaagcaccaagtgaagctgatctttaactgccccgagtgcggcaacgacatcaattacatccagagcgagaacatcgagctgtgcagctgcggctacgacttcagacagatcaagcccagcgagaaaaccgaagagagcatgagcgctagcctgttcgagagcagcgagaacgccgataagctgagcctggaattcggcaagtacctgtggttcagcaagcacagcggcgtggaactggacgacgactacttcctgcctaagttcaaccggtacttcagcaactggcccgacaactacctgagctacctgaaaacccaagagtccaaggccatcgagaagcagaccagccggttcaaccagatcagcgtgaacgacatttggtgcgagcagctgcagaacaccagactggtcaccaccaacagagtgaacaacctggtgctggaccagctggccaattacttcatcgacctggtcaacagataccccaagtgccagcacgccaatatcgccgacacactgatcaaccaggtggactctgccctgctgctgagaacctctgtggaacaggtgttccggctgctcgaggacggctatctgaaagtgaagttcggcgtgcccaccgaggccatctacaagcctcacatccccatcttctacctgcgggaagtgatcgagctgacacaggcccagggcagcaacaccagcatgttcgagcacatgatcagcgcctggtga

SEQ ID NO: 431 - DNA, 690 bp, Artificial Sequence
  Synthetic
atgtctgccctgcctagcctgtctacagccacactgctggaactggaaaccgccttcgatacccctgccagaaacctgaccaagagccggggcaagaacatccacagatacgtgtccgccaagatgggcaagcgcgtgaccgtggaaagcttcctggaatgcgccgcctgctaccacttcgacttcgagccttctatcgtgcggttctgcagccagcctatccggttcagctacaacctgaacggcaagacccatacctacgtgcccgacttcctggtgcagttcgataccggcgagtacaagctgtacgaagtgaagtccgacaaagagagcagcaacgaggaattccactgcgagtgggaagccaaagtgcagggcgcctttgacatcggcctggaactcgaactggtggtggaagaggacatcctggacgaagtgatcttcaacaatctgaagctgctgcaccgctacgccagccgggataacctgaatgacttccaccagatcctgctgaccacactgaagcggaatggcacccagacagccaagtctctgggacaccacctgggcctgaatggcagaaagatcctgcctttcctgtgcgacctgctgagccggaatctgctgcagacaagcctggaaacccctctgtctctggaaagcgagttcgagctgggctgctacgcttga

SEQ ID NO: 432 - DNA, 1812 bp, Artificial Sequence
  Synthetic
atgcccaagaagtccttcagcagcttccacagaaagagcgccctgcagcaagagaagctggaacagaacgacagagtggtggacagcaacgacgtggacgaggccatctaccaggacatcagcgcctttccagagaatatcgccaaccagatcaccttccggctgagcatcctgagatttctggccggcaagtgcgagaagatcacccctaagaccatcgagccctacagagtggccctgcagagactgcacgacacaaacatccccagcagcatcagcatctaccggtggtggctggtgtttagagccagcggctacaaccccgtgtctctggcccctaacttcaagagcagaggcaacagaggcgccaaggtgtcccctgtggtggactccattatggaacaggccgtggaaagagtgatcagcggccggaagatcaacatcagctctgcccatcggagagtgaagcggaaagtgcggcagtacaatctgacccacggcaccaactacagctaccctaagtacgagagcgtgcggatcagagtgaagaagaaaacccctttcgaggtgctggtggccaagaaaggcgagagagtggccaagcgcgagttcagaagaatgggcaagaagattaccaccagcgccgtgctggaacgcgtggaaatcgaccacacaatggtggacatcttcgccgtgcatcccgtgcacagagtgacacttggtagaccctggctgacccagctggtggactgttactctaaggccgtgatcggcttctacctgggcttcgagcctcctagctacgtgtcagtcagcctggctctgaagaacgccatccagagaaaggacgacctgctgagcagctacgagagcatcgagaacgagtggctgtgctacggcatccccgatctgctggtcaccgacaacggcaaagagttcctgagcaaggccttcgacaaggcctgcgagagcctgctgatcaacgtgcaccagaacagagtggaagtgcccgacaacaagcccgacgtggaacggaagtacggcaccatcaataccagcctgctggacgatctgcccggaaaggccttcagccagtatctgcagagagaaggctacgactccgtggatgaagccacactgaccctggacgagatccaagagatctacctgatctggctggtggatatctaccacaagggcagcaaccagcggggcacaaactgccctaatatcgcctggcggaacggctgccaagagtgggagcctgaggaattcagcggccccaaggacgagctggacttcaagttcgccatcgtggatagcaagcagctgaccaaggctggcgtgaccgtgtacaagggcctgacatacagctccgagagactggccggctacagaggcaaaaagggcaatcacaaggtgcagttcaagtacaaccctgagtgcatggccgtgatttgggtgctcgacgaggacgtgaacgagtacttcaccgtgaatgccatcgactacgagtacgccagcagagtgtctctgtggcagcacaagtacaatatgaagtacctggccgagctgaacagcgccgagtacgatgaggacaaagagatcgacagcgagatcaagatcgaggaaatcgccgaccggtccatcctggaaacaaagaagatcagaagccggcggaggggcgccagacaccaagaaaattctgccagagccaagagcatctccaacaccaagctggtgcctccacagaaggacgaggaagagatcgtcatcgtcgacaacgaggactgggacatcgattacgtgtga

SEQ ID NO: 433 - DNA, 990 bp, Artificial Sequence
  Synthetic
atgaacgagacaagagaggcccggatcagcaaggccaagagggcctttgtgtctacccctagcgtgaccaagatcctgagctacatggaccggtgcagggacctgagcgatttcgagtctgagcctacctgcatgatggtgtttggcgcctctggcgtgggcaagaccaccgtgatcaagaagtacctgagccagaacaaccgggacagcaaagtgcggggagatgtggtgcctgtgctgcacattgagctgcccgacaatgccaagcctgtggatgccgctagagaactgctgctggaaatgggcgatcccctggctctgtacgataccgacctggccagactgacccagaagctgaccgatctgatccctgtcgtgggcgtgaagctgatcatcatcgacgagttccagcacctggtggaagagagaagcaaccggatcctgacacaagtcggcaactggctgaagatgatcctgaaccggaccaagtgtcccatcgtgctgttcggcatgccctacagcaaggtggtgctgaccgccaattctcagctgcacggcagattcagcatccagttcgagctgcggcccttcaactatcaaggcggagagggcgtgttcaagaacttcctgtggaacctggacaaggccctgcctttcgacaaagagatcggcctggccaacgacgacctgaagaagaagctgtacgcctttagccagggcaacatgcggagcctgcggaacctgatctatcacgcctctgtggaagccatcgacaacaaccacgacaccatcaccatcaaggacttcgtgttcgccgccaagctgaccagcggcgataagctgagcagctggatcaaccccttcgagaagggcaccaaagtgaccgagcagatgctgaggcctcctccagaggatatcggctgggaagattacctgagaaacaagcccaagaagaaccggaagaaccaggactccaacatgttcgactga

SEQ ID NO: 434 - DNA, 1185 bp, Artificial Sequence
  Synthetic
atgttcctgcagcggcccaagccttactccgacgagagcctggaaagcttcttcatcagagtggccaacaagaacggctacagcgacgtgcaccggtttctggaagccaccaagggctttctgcaggacatcgaccacaacgcctaccagacattccccaccaatatcgccaagatcaacccctgcctggccaaggattctagcggagccagaacagccagcctgctgaaactggcccagctgaccttcaacgagcctacagaactgctgggcctcgccatcaaccggaccaacctgaagtacagccctagcaccagcgccgtgatcagaggcagcgaagtgttccctagaagcctgctgcggaccaagtctatcccttgctgccctctgtgcctgcaagagaatggctacgccagctacctgtggcacttcgagggctacgatcactgccacatccacgatgtgcccctgctgaacagctgtagatgtggcgccgagcacgactacagagtgtctagcctgtctggcatgtgcggctcttgcgaagccacactggccatcaagagcagagagaagtcccacagcgccacactgagcgtggcaaattggctggccggcaacgagtgcaagaacctgcctcacgtgccccggtcttatagatggggactcgtgcactggtggtcccacatcagcgacaacgagttcgaccacttcagcttcgtgcagttcttcagcaactggcctcgggccttccacagcatgatcgacgacgagatcgagttcaacctggaacacgccatcgtgggcaagaaagaactgagagtgaaggacctgttcggccggatcttcttcagctccatcagactgcccgagcggaacctgcagcagaatatcgtgctgggcgagctgctgagacacgtggaagctcacctgtgggacaatgagggcctgctggccaacctgagaatgaacgccctggaagctaccgtgttcctgaactgcagcctggatgagatcgccagcatggtggaacagcggatcctgaagcctaaccggaagcctaagcctaacatgcccctggccgtgaacgactacctgttctacttcggcgacatcttctgcctgtggctggctgagttccagaccgacgagttcaatcggtccttctacgtgtcccggtggtga

SEQ ID NO: 435 - DNA, 624 bp, Artificial Sequence
  Synthetic
atgtacagacggcacctgaagcacagcagagtgaagaacctgttcaagttcgtgtccgccaagatgaataccgtgttcaccgtggaaagcagcctggaattcgatacctgcttccacctggaatactccccagccgtgaaggcctttgaggcccagcctgagggcttctactacaccttcgagggcagagactgcccctacacacccgacttcagagtgctgaacgagaacggcagcgtgggctacctggaagtgaagccttctgccaaggtgctggaaagcgacttcctgcagcggttcccattcaagcagcagagagccaccgagctgagctgccctctgaagctgatcaccgagcggcagatcagaatcgaccccatcctgggcaacctgaagctgctgcacagatacagcggcttccagagcttcacccctctgcacatgcagctgctgggactcgtgaaggacttcggcagagtgtcactggccagactgagcggatctacaggtgctcctcctggcgaagtgctggccacagtgctgtctctgattgccagaggcctgatccacagcgatctggccgaacacgagatgggcttcagcaccatcgtgtggatgcggtga

SEQ ID NO: 436 - DNA, 1891 bp, Artificial Sequence
  Synthetic
atgtgtgcccagcctaccacagaggtgcccagcgatctgttcgaggacgagttcacacaccctcatcctccagagagccctaacctggccgccacaacacctacagtgctgagcgccaccgtggatagctttcccgccgatctgaaagcccaggctctgcacagactggactacatcagatggatcgaggacaacctggctggcggctggaccgagaaaaatctggctcctctgctggtggaagccgccaaagttcttcctcctcctgctcctaactggcggacactggccagatggcagaagaactacaaccagcacggccggaagctgatggctctgatccctaagcaccaggccaagggcaacgtgaagtccagactgcctagcagcgacgaggtgttcttcgagcaagccgtgcactgtttcctcgtgggcgagcagccttctatcgccagcgtgtaccagtactacaccgacatcatctgcatcgagaacctgaacgtggtggaaaaccccatcaaggctatcagctacaccgcctttttcaaccggctgaagaagctgcctgcctaccaagtgatcaagagccggaagggcagctacatggccgacgtggaattcatggccatcagcagccacattcctccaagctgcgtgatggaacgcgtggaaatcgatcacacccctctggacctgatcctgctggacgatgatctgctggtccctctgggcagaccttgtctgaccctgctgatcgacagctacagccactgcgtcgtgggcttcaacctgagcttcaaccagcctggctacgagagcgtgcggaacgccctgctgaatagcatccctcctaagaactacgtgaaggacaagtaccccagcgtggaacacgagtggccttgctatggaaagcccgccacactggtggtggacaacggcgtggaattttggagcaagagcctggaacagagctgcagagagctgaacatcaacacccagtacaaccccgtgcgcaagccttggctgaagcccatggtggaaagaatgttcggcaccatcaaccgcaagctgctggaatctatccccggcaagaccttctccaacctgctggaaagaggcgagtacgaccctcagaaagacgccgtgatgcggttcagcaccttcctggaaatctttcaccggtggatcatcgacgtgtaccactacgagcccgacagcagaaggcggtacatccctatccagagctggcagtacggctgcaacaaactgcctccagctcctgttgtgggcgacgatctggccaagctggaagtgatcctgagcatcagcctgcagtgcacccacagaagaggcggcatccagagattccacctgagatacgactccgacgagctggcctcctaccggatgaactaccccgataagacccacggcaagagaaaggtgctggtcaagctgaaccccagggacatcagctacgtgttcgtgttcatcaaagaggccggcagctttatcagagtgccctgcatcgatcccgagggctacacaaagggcctgagcctgcaagagcaccagatcaacatgaagctgcaccgggacttcatcgacacccagatggatgtggtgtccctggccaaggccagaacctacatcaacagccggatccagagcgagctgagcgaagttcggcagaccctgaagaagagaaacaccaagggcatcaacaagatcgcccggtacagagacatcggcagccagacaacaaccggcctgctgtctggacctcagctgtccgagagcaaggacgacgtgccaatccagcctaagaccacacctcctcagctggaagatgactgggacagcttcaccagcggcctggaaccttactgat

SEQ ID NO: 437 - DNA, 1008 bp, Artificial Sequence
  Synthetic
atggaactgagcagcaccgacgccgacaagctgaagtccttcatcgagtgctacgtggaaacccctctgctgcggatcatccaggacgacttcgaccggctgagatacgacaagcagtttgccggcgagcccatctgcatgctgctgacaggcgattctggcaccggcaagagcagcctgatccggcactacatggcccagtttccagagcagcacggccacggatttgtgcggaaacctctgctggtgtctcggatccccagcaagcctacactggaaagcacaatggtggaactgctgaaggacctcggccagtggggcagcgagtatagactgcatagaagcagcgccgagagcctgacagaggccctgatcaagtgtctgaccagatgcgagacagagctgatcatcatcgacgagttccaagagctgattgagaacaagacccgcgagaagcggaaccagatcgccaaccggctgaagtacatcagcgagacagccaagattcccatcgtgctcgtgggaatgccttgggccgccaagattgccgaagaacctcagtgggccagcagactgatggtgcagcggacaatcccattcttcaagctgagcgaggacgccgagtccttcgtcagattcgtgatgggcctcgccagacggatgccttttgccacacctcctaagctggaagccaagcacaccatcttcgccctgttcgccttcagctatggctgcgtgcggcggctgaaacaccttctggatgagtctgtgaagcaggccctggccgctcactctgaaacactgctgcacgagcatatcgccgtggccttcggcctgttctaccccgaccaagagaacccattcctgcagagcatcgatgagatcaaggcctgcgaagtgacccagtacagcagatacgagatcaacgagagcggcaccgaggaagtgctgaaccctctgaagttcaccgacaagatccccatcagccagctgctgaagaagcggtga

SEQ ID NO: 438 - DNA, 1233 bp, Artificial Sequence
  Synthetic
atgcagctgctcgtcagacctgctcctttcagcgacgagagcctggaaagctacctgctgagactgagccaagagaacggcttcgagagatacgccctgctgtctggcgccatgagagatgctctgctccagcaggatcatcaggccgctggcgcttttcctctggaactggctcgagtgaacgtgttccacgccaacagatccagcagcctgagagtcagagccctgcacctgattgagcagctgacagatctggcccctcacagcctgctgcagctggcccttatcagatccgccatgcctattggagccggccatgcctgtgttcagagaggcggagttgacatccctctgagactcgtgcggaccagacagatccctgtgtgtccagtgtgtctgagcgagagcgcctacatcagacagcattggcactacgccccttacgtggcctgtcatctgcacggacacgaactgctgagcgtgtgtccttcttgtggcaaggccctggactaccagtgcaacgagagcttcacccactgcagatgcggcttcgacctgcggcactctattacaccaccagccagcaaccaggccatccagatctctgccctgatctgcggagccagatgggagagcacaaaccctctgctgatctgccctcatcctagccagctgttcggcgccatcttctggtactggtgcagataccatgccgaagccgctggacagcctgcctctcattctctggtccagaccatcgactacttcgccgcctggcctgccaattttcacgccgaactggatcagtgggcccagagaggactgctgaggcagaccagactgctgaacgagacacctttcggcgaggtgttcggagccgtgctgagtgattgcagacagctgccattccaggacctgggcgccaactttatcctgagagccctgagcgactacctgacagccctggtggtcaatcaccccaagaccaggcagcccaacctgggcgatattctgctgtccgcctctgatgctgccgctctgctgagcacatctgtggaacaggtgttccggctgcagcaagagggctatctgaccctggcctacagactgagaaggcacgctggcctgacaccttacgaccccatgttccacctgagacaagtgatcgagtaccggctggcccacggcgctatgtatcctccagccttctacagcttcctgcctgcctggtaa

SEQ ID NO: 439 - DNA, 690 bp, Artificial Sequence
  Synthetic
atgtctgccctgcctagcctgtctaccgccacactgattgccctggaaagcgccttcgatacccctgccagaagcctgacaaagagccggggcaagaacatccacagatacgtgtccgccaagatgggcaagcgcgtgaccgtggaaagcttcctggaatgcgccgcctgctaccacttcgacttcgagccttctatcgtgcggttctgcagccagcctatccggctgagctactgcctgaatggcaagacccatacctacgtgcccgacttcctggtgcagttcgacaccggcgactacaagctgtacgaagtgaagtccgacatggaaagcagcaaagaggaattccactgcgagtgggaagccaaggtgcagggcgcctttggaatcggcctggatctggaactggtcaccgaggaagagatcctgaacgaagtgatcttcagcaacctgaagctgctgcaccgctacgccagcagagatcacctgaacgacttccaccagacactgctggccactctgaagcccaatggcacccagacagccagatctctgggacaccatctgggcctgagcggcagaaagatcctgccaatcctgtgcgacctgctgagcagaaacctgctgcagaccaacctggaaacccctctgagcctggaatccgagttcgagcttgtgtgctacgactga

SEQ ID NO: 440 - DNA, 1812 bp, Artificial Sequence
  Synthetic
atgaccaagaagtccttcagcagcttccacagaaagagcgtgctgcaccaagagaagctggaacagaacgacagagtggtggacatcaacgacgtggccgaggccacctacaaggacatcagcgcctttccagagaagatcgtggtggaaatcaccttccggctgagcatcctgagactgctgggcagaaagtgcgagaagattgtgcccaagagcatcgagccccacagagtggatctgcagagaagccacgaccggaagatccctagcgccatcaccatctacaggtggtggctgaccttccgcgagagcgactacaaccctgtgtctctggcccctgacttcaagagcagaggcaacagagatcccaaggtggcccctatcgtggacgccattatgaagcaggccgtggaaagcgtgatcagcggcagaaagatcaacatcaacagcgcctatcggcgcgtgaagcggaaagtgcggcagtacaatctgacccacagcaccaagtacaagtaccccgagtacgagagcgtgcggatcagagtgaagaagaaaacccctttcgagatcctggccgccaagaaaggcgagagagtggccaagcgcgagttcagacggatgggaagaaagatcctgaccagcagcgtgctggaaagagtggaaatcgaccacacagtgctggacctgttcgccgtgcacgaggaacacagaatccctctgggtagaccctggctgacccagctggtggattgctactctaaggccgtgatcggcttctacctgggcttcgagcctcctagctacatgagcgttagcctggctctgaagaacgccatccagcggaaggataccctgctgagcagctaccccagcatcgagaatgagtggctgtgctacggcatccccgatctgctcgtgaccgacaacggcaaagagttcctgagcaaggccttcgacaaggcctgcgagagcctgctgatcaacgtgcaccagaacaaggtggaaacccctgacaacaagccccacgtggaacggaactacggcaccatcaataccagcctgctggacgacctgcctggcaaagcctttagccagtacctgcagcgcgagggctacgattccgtgtctgaagccacactgaccctggacgagatcaaagagatctacctgatctggctggtcgacatctaccaccggaagcctaaccagcggggcaccaactgtcctaatgtggcttggagacagggctgccagaactgggagcccgaggaatttctgggcagcaaggacgagctggacttcaagttcgccatcgaggaccacaagcagctgaccaaggccggcatcacagtgtctaagggcctgacctacagcagcgaaagactggccggctacatgggcaaaaagggcaaccacaaggtgcagttcaagtacaaccccgagtgcatggccgtgatttgggtgctcgacgaggacgtgaacgagtacttcaccgtgaatgccatcgactacgagtccgccagacgagtgtctctgtggcagcacaagtataacatgaagtaccaggccgagctgaacagcgccgagtatgacgaggacaaagaaatcgacgccgagatcaagatcgaggaaatcgccgaccggtccatcctggaaacaaagaagatcagaagccggcggagaggcgccagacaccaagaaaattctgccagagccaagtccatcagcaacaccaagctggtgcctccacagaaggacgaggaagagatcgtcatcgtcgacaacgaggactgggacatcgattacgtgtga

SEQ ID NO: 441 - DNA, 990 bp, Artificial Sequence
  Synthetic
atggacgaggacagagagacacggatcagcaaggccaagcgggcctttgtgtctacccctagcgtgaccaagatcctgggctacatggaccggtgcagagagctgagcgatttcgagagcgagcctacctgcatgatggtgtttggagcctctggcgtgggcaagaccaccatcatcaagaagtacctgagccagaacaagcgggacagcgaagctagaggcgacgtggtgcctgtgctgcacattgagctgcccgacaatgccaagcctgtggatgccgctagagaactgctgctggaaatgcgggatcccctggctctgtacgagacagacctggccagactgaccaagcggctgaccgatctgattcctgtgaccggcgtgaagctgatcatcatcgacgagttccagcacctggtggaagaacggtccaaccgggtgctgacccaagtcggcaattggctgaagatgatcctgaaccggaccaagtgtcccatcgtgctgttcggcatgccctacagcaaggtggtgctgaaggccaactctcagctgcacggcagattcagcatccagttcgagctgcggcccttcaactaccagaatggcgagggcgtgttcaagaccttcctggaacacctggacaaggccctgcctttcgagaaagaagtcggcctggttgagcagggcctgcagaagaagctgtacgccttcagccagggcaacatgcggagcctgagaaacctgatctaccaggccagcgtggaagccatcgacaagcagcacgagacaatcaccgagcaggacctgatcttcgccagcaagctgaccagcggcgacaagagcgacagatgggagaacccctttgagaagggcgtgaaagtgaccgagggcatgctgagaagccctccaaaggatatcggctgggaagattactaccaccacgtgaccagcctgaacgccaagagaaacggcggcaacatgttcgagtga

SEQ ID NO: 442 - DNA, 1185 bp, Artificial Sequence
  Synthetic
atgctgctgcagaggcctaagcctcacagcaacgagagcctggaaagcttcttcatcagagtggccaacaagaacggctacgaggacgtgaacagattcctgatggccaccaagagatacctgcaggacatcgacttcagcggcttccagacattccccaccaacatctgcaagatcaaccccgccagcgccaagtctagcagctctgccagaattgccagcctgctgaaactggcccagctgaccttcaacgagcctcctgatctgctgggcctcgccatcaacaggaccaacctgaagtacagccctagcaccagcgccgtgatcagaggcagcgaagtgttccctagaagcctgctgcggaccaagtctatcccttgctgccctctgtgcctgcagcagaacgattacgccagctacctgtggcacttcgagggctacgatcactgccacatccacgatgcccctctgctgaacagctgtagatgtggcgccgagtacgactacagagtgtctggcctgtctggcatgtgcggcgagtgcaagaaaaccatcagcaccaagagcagcgagaacagccacaaggccaccagcacagtgtctagctggctggccggcaacgagtccaaggatctgcctgatgtgcccaagagctacagatggggcctgatccattggtgggtgcacatcagcaagaacgagttcgaccacgtgtccttcatccagttctttagcaagtggccctccagcttccacagcatgatcgacaacgagatcgagttcaacctggaacacgccatcgtgggcagaagagagctgcggattaaggacctgctgggcagaatcttcttcagcagcgtgcggctgcccgagagaaatctgcagcacaacatcgtgctgggcgagctgctgagacacaccgaaatgcacctgtgggacaacaacggcctgatcgccaacctgagaatgaacgccctggaaaccaccgtgtttctgaactgcagcaaggacgagctggcctccatggtggaacagcggatcctgaagcctaacagaaagaccaagccaaacatgcccctggccgtgaacgactacctgttctacttcggcgacatcttctgcctgtggctggctgagttccagaccgacgagttcaatcggagcttctacgtgtcccggtggtga

SEQ ID NO: 443 - DNA, 660 bp, Artificial Sequence
  Synthetic
atggccaagaagcagaaaagacgggacgtgcggaagctgatgagcaagagcgtgaacgtgttccacggcagaaagagcgaggactaccccacctacacagagagccctctggaagccgatctgtgctaccacctggaattcgacaagaacgtggtgtcctaccaggctcagccctttcctatcacctactttttcgacggcaagctgcggagctacacccctgacttcaaagtgacctaccagaacggcagcgtggtgtacatcgaagtgaagtacgaggccgacaagacccggatcgacaacttcgagcagtggatcgaggccatcaaccagagcctgatcagccagggcagcagagtgatcgtgatcaccgagctgttcatccggaagcagcccacctacgagaacctggtcaacgtgtacagcgccaccagactgaagctggacaaggccttcctggtcaagatcatcaccgccttcgagagcaagaagaacctgacaatcgccgagctgatcacccaggacaagagagagtacgagctggaacagatccaccggctgatcttcgagagaaagctgatcgcccctatcaacatcgagatcatcagcaccagcagcgtgatccagcacagcggcgagagctacgagtgctacatctga

SEQ ID NO: 444 - DNA, 2028 bp, Artificial Sequence
  Synthetic
atgagcgccacctacaacaacgaggacttcctgctgatcaccaacgacgacatcagccggcagttccagatcctgagctgcaatgccagagctgtgcggctgctggatatcgtgacaggcgtggaaagcgagcggaaagtgaccgagctggacgagctgatcgtgtctggaaatgccgccatccagaagaaggacacccaggccagaaagcggctgaaccccgagagcagagatttcggcagctaccccgagaagtccaagtctcaggcccgggacagactgaagatcgtgatgggagtgatcgaggccaagcctaagagcttcagcgccaagagactggaacccatcatcagcaagctgtatagcgagtacaccttcgagacactgaagcggaagcccagcagcagatccgtgatccggtggatccagagattcagcagcagcggccacaacatcagaagcctgctgcctttcgacgagatgaagggcaaccgcgagaacaaggtggaccccagaatcgagccttacgtggaagccgccatcaagcacttcaagagccctgagtgcccctctatcgccaagagctacgatgagctgaagaaactggtgtacagcaagaacgccgagatcgtggacgaggccaaaaagatgaagcccatgcactacagcgccttcgtgaagcggctggaaaaagaggcccctaaagagctgaccaaggccagattcggcaaagaggccgccagaaaactgttccgggaagccaaacagccccaagagatcagcctgatcctgcagcgcgtggaagtggaccacaccaagctggacctgttcatcgtggatgagaagaacttcctgcctctgggcagaccctgggtcacagccctgatcgactacaagagcaagagcatcctgggctttcacatcggcttcgagcctccaagctacctgtctatcgctagcgccctgagacacgccatcctgcctaagtcctacgtgaaagaaagataccccgaagtgaactgcgactggaattgctacggcatccccaagtctatcgccgtggacagaggcaaggacttcgagtccaaggccttcgaggacgcctgcatggatctgtttatccggatccacagaaaccccggcagacacgcctggtacaagggcagcatcgagagctacttcaacaccctgaacaagaggctgctgaacgacctgaaaggcaaggtgttccccaacatcggcgagagcaacaactacaaccctcagaaaaacgccgtgatcagcttcgaggtgttcatgcgggtgttccacatctgggtcatcgacatctaccagcagagcaaggtgtccaagggcacaatcatccccagagtgtcctgggaagaggacctggacgttgtgacaagaggcgccatcaacagagatgccctggacatcatcctgtgcgagcacaagacccggatgaacagcgagaagggcatcgtgctgaaccacatcttctacgacaacgagcagctgtacaagctgagggccctgaccggcatcagaaaggtgcacatcaagttcacccgcgagaatctgggcttcgtgtgggtgcaagacgaccagaacaatcaagagaacgtgttcttcaaggtgccggccatcaaccagaagtacgccagcggactgagactgcaccagcacgaagtgatcaagaacttctgcgacaagatgctggacctcgagctgaacgaggaaaatctggccctggccaagatcaagatggaaaacctgatcagcgactgggtcgacaccgtgaacgccaagaaggtgtcctctctgcagaaggccgctcggtattacggcgtgggacagcagagtgatcagaccgtggtgtccaccgtgaccaaggacaccatcgagaaccagctgatctccagcagcaccgccaccgaggaaagactgaaaaagggcgacgagaacgagagcggctacgagttctacgacggcaagaacaatctgctgcccgacgagctggaattctga

SEQ ID NO: 445 - DNA, 1074 bp, Artificial Sequence
  Synthetic
atgagcaacgagagcgagctgttcaccgagcaccagaaaaagatcgtgaagcagatcaagaacatcttcgtggccaccgacacactgcagctgatcctggacgagatgaaggaaatcagagagctgagcaagatcgacgagtacgagaacctgcctgagtgcatcttcatcggcggcgaaacaggcacaggcaagagccacttcatcaagcagtaccagagagagtacgaccgctacgacctgatctctcacctgggcgagagaaccatcgtgcccgtgctgtactgcgagctgcctaaggccacacatcccaagcctgtggtgtccgagctgctggatgttctgggcgatcctctgaagggactgaaaggggatgtgcggcagctgaccagcagactggtgcatctgctgaaagagagcaagacagagctgctgatcatcgacgagctgcagcacgccatcgagaaggccagcaataccgtgatccaggacatcggcgagtggttcaagatcctgatcaacaagtctaagatcccgatcgccttcttcggcgagccttgggctacagccgtgttcgatgtgaacccacagctgagcagacgggtgtccaagcgggatttcgtgatccccaactacacagccctgaccttcgacaagttccagatgttcatcgagaacctccagaagaagctgcccatcaagcccgctcaggacctgttcgatgacgagatggccttcaagctgttcgccgccagcagcggcaatctgagcaatctggtcaagggcatcatcatgcccgccagcatcagcgcccttaaagaaggcgccgattgcttcaccgaggaacacatgaagctggcctttaagcagagaaagagcctgagccagaaagccaacttcgtgatcaagaatcccttcaagaagaagattgacgacatcgaaggctggcagcagctgacaagctcccactgggacaacaccgccaataccaaggccgagagaatcatccacgccacctacagcaggctgaagttcaaggacatccccgccaaccagatcctgagcaagcggtaa

SEQ ID NO: 446 - DNA, 1188 bp, Artificial Sequence
  Synthetic
atgaccttcctgatccggaaccgggtgttcaaggacgagacactggaaagctacttcatccggctggcccacagcaacggcttcgagaagatcaacctgttcctgagcagcctgaacgccttcttcatcgagtacgacatcaagctgaagggcatcctgcctaccgctctgtccagactgaacctgtacaaggcccacaacagcagcgcctatagagtgcgggccattaagctgctggaagagttctgcgacctgcagcctagcagcctgctgagagtgtccgtgctgaggaccaacaagcacttcggcagctatgccgcactggccagatccaacgtgctgttccccaacatcatgctgcgcgagaaagtgatccctgtgtgccccgagtgcctgcaagagaagtcctacatccggttcatctggcacctgaagcctatccagcactgccccaagcaccacgtgaagctgatcttcaactgccctgagtgcggcaacgatatcaactacatccagaacgagaacgtcgagctgtgcagctgcggcttcgacttcagacagatcaagcctcctaacaagatcgaagagagcatgagcgccagcctgttcgagagccctgagaatgccgaacacctgagcctggaattcggcaagtacctgtggttcagcaagcggagcggcgtggaactggacgatgagtgcttcctgctgaagttcaaccggtacttcagcaactggcccgacaactacctgagctacctgaaaacccaagagagcaatgccatcgagaagcagaccagccggttcaaccagatcagcgtgaacgacatctggcgggaccagctgcggaatgtgaagctgtccagcaccgacaaagtgaacaacctggtcctggaacagctgaccaattacttcatcgacctcgtgcggagataccccaagtgcgagcatgccaacgtggccgacacactgatcaaccaggtggactctgccctgctgctgagaacctctgtggaacaggtgttccgcctgctcgaggacggctacctgagagtgaagtttggcgtgccaaccgaggccatctacaagcctcacatccccatcttctacctgcgggaagtgattgagctggtgcaggcccaaggcgccaataccaccatgagcaaccacatcatcagcgcctggtga

SEQ ID NO: 447 - DNA, 627 bp, Artificial Sequence
  Synthetic
atgtacatccggaacctgcggaagccctctccaaacaagaacgtgttcaagttcgccagcaccaagatgggcgaagtgatcctgtgcgagagcaccctggaattcgacgcctgcttccaccacgagtacaacgacgagatcgagagctacggcagccagcctcagggctttaagtacgagttcaacggcaaggtgctgccctacacacccgacgctctgatcctgtacaagaacggcgtgcacaagtaccatgagtacaagccctacagcaagatcagcagcaccctgttccgggacaagttcgaggccaagagacagaccagcctgaccatgggcatcgacctgatcctggtcaccgaccggcagatcagagtgaaccccatcctgaacaacctgaagctgctgcacagatacagcggcgtgtacggcgtgtccaaggtgcaggttgagctgctgaagatcatccggtacagcgagacaatcaagctgaacgacgtgtccagccagtgcaacctgagcatcggcgagacaagaagcttcatctacggcctgatccacaagggctttctgaaggccgacctgggcaaagaggacctgagcaacaaccccacactgcgggctgtgtaa

SEQ ID NO: 448 - DNA, 1843 bp, Artificial Sequence
  Synthetic
atgagcgacttcatcaacgagttcgacaacagcatcgtgcccatcaagcccgagacacccgaccagtatgtgaagctggaagatgccacactgatcaagcgcgacctggatacctttcctgacttcctgaaggacaaggccttcgacaagtacaagctgatctccatcatcgagaaagagatcagcggcggctggacccagaagaacatcgaccccatcctggaaaacctgttcgaggaaaacaacgccaagaagcccaactggcggacagtcgtcagatggcggaaggcctacatcgacagcaacggcgatctgagcagcctggtggtcaagcagcacaagatgggcaaccgcaccaagagaatcgacggcgacgagttcttcttcgataaggccctggaacggttcctggacgccaagaggcctaaagtgaccaccgcctaccagtactacaaggacctgatcatgattgccaacgagaacgtggtggaaggcgagatccccgtgatcagctacagcgccttcaacaagcggatcaagagcctgcctccttatcctaccgccattgccagacacggcaagttcaaggccgatcagtggttcgcctactgcggctctcacatccctccaaccaggattctggaacgcgtggaaatcgatcacacccctctggatctgatcctgctggacgacgagctgctgatccctatcggcagaccctacctgacactgctggtggatgtgttcagcggctgcatcctgggcttccacctgagctacaagagccccagctatgtgtctgccgccaaggccatctctcacgccattaagcctaagagcctcgagcacctgtctatcgccctgcagaacgactggccttgctacggcaagatcgagaatctggtggtggacaacggcgccgagttttggagcaagtctctggaacacgcctgtcacgccaccggcatcaacatccagtacaaccctgtgcggaagccctggctgaagcccttcgtggaaagattcttcgggatgatcaaccagtgcttcctgagcgagattcccggcaagaccttcagcaacatcctcgaaaaagaagagtacaagcctgagaaggacgccatcatgcggttcagcacctttgtggaagagtttcaccggtggatcgtggacgtgtaccaccaggatagcaacagccgggaaacccgggtgccaatcaagagatggcagcagggcttcgatgtgtaccctccactgaagatgaacgacgaagaggacgccagattcagcatcctgatgcgggtgtccgacaccagaacactgacccggaacggcttcaagtttgaggaactgatgtacgacagcacagccctggccgactaccggaagcactaccctcagaccaaagaaagcgtgaagaagatcatcaaggtcgaccccgacgacatcagcaagatccacgtgtacctggaagaactggaaagctatctggaagtgccctgcaccgagacaaccggctattctgatggcctgagcctgtacgagcacaagaccatcaagaagattaaccgcgagatcatccgcgagagcaaggactctctgggactcgccaaagccagaatggccatccacgagagaatcaagcaagagcaagaggtgttcatcaagtccaagaccaaggccaagctgaccgccgtgaagaaacaggcccagattgccgacgtgtccaacacaggcaagggcagcatcaaggtgcccgagatcgagagcatccagcctaagcggagcaacatctccgacgtgctggatgactgggaagatgaagtggaagccttcgagtgac

SEQ ID NO: 449 - DNA, 1014 bp, Artificial Sequence
  Synthetic
atgaacgacctgaccgagctgcagatccagcagctgagagacttcagcgactgcatcgtggtgcaccctcagatcaagatcatcttcgacgacttcgatgagctgcggttcaaccggaagttccagagcgaccagcagtgcatgctgctgatcggagatacaggcgtgggcaagagccacctgatcaaccactacaagaaacgcgtgctggccacacagaactacagcagaggcacaatccccgtgctggtgtccagaatctccagaggcaaaggcctggaagccacactgatccagatgctggctgacctggaactgttcggcagcagccagattaagaagcggggctacaagatcgacctcaccaagaaactggtggaaaacctgattaaggcccaggtggaactgctgatcatcaacgagttccaagagctgatcgagttcaagtccgtgcaagagcggcagctgatcgccaacggcctgaagttcatcagcgaagaggccaaggtgcccatcgtgctcgttggaatgccttgggccgagagaatcgccgaggaacctcagtgggccagcagactgatccggaagagacagctggaatacttcagcctgaagaacaacagcaagtacttccggcagtacctgatgggcctcgccaagaagatgcccttcgacgagcctcctaagctgaaagtgaagcacaccacactggccatcttctccgcctgcaagggcgagaatcgggccctgaaacatctgctgacagaggcccttaagcaggccctgagctgcaatgagcacctggaaaacaagcacttcgtgttcgccttcgacaagctgtacctgagcgacacctccagcttctcccagcagaagctgaccatcaagaaccccttcaagcaggacatcaaggatatcaagatctacgaggtgtccaagaacagcagctacaaccccaacgccatcgatcccgaggatgccctgacaggcagagagtttagcctgatcgcctga

SEQ ID NO: 450 - DNA, 1230 bp, Artificial Sequence
  Synthetic
atggccttcctgttcagccctaaggccacacctttcagcgacgagagcctggaaagctacctgctgagaatcgtgtccgagaacttcttcgacagctacgaggaactgagcctggccatcagagaggaactgcacgagctggattttgaggcccacggcgcctttccaatcgacctgaagagactgaacgtgtaccacgccaagcacaacagccacttccggatcagagccctgggactgctggaagctctgctggacctgcctagattcgagctgcagaagatcgccctgctgaagtccgacgtgaccttcaatagcagcgccgctctgtaccggaacggcgtggacatccctcagaagttcatcagataccagggcaacagaaaggcctacagcatccccatctgtccccactgcctgagagaggaagcctacatcaagcagagctggcacatcgagtgggtcaacatctgcgtgaagcaccagtgcaccctgatccacaactgccccgagtgcaacctgcctatcaactacatcgagaacgagagcatcacccactgcagctgcggatttgaactggccagcgccgatagcctgcctgtgaaagagaagtccatcaagtacctgcatgccctgctggacagcaatatctgcagcggcagcaaccctctgttcaacttcaccaccagcagcgacagattcgccgcactgctgtggttccacaagcggtacagccacaagaacgtgttctgcctggacgaggccgtggaatacttctctgaatggcccgccagcttctacaaagagctgaacggcctgaccaacaacgccgagatgaagctgatcgacctgttcaacaagaccgagttccggttcatcttcgaggacctgatcctgagcagccccaacacacagatcctggaaaagccccacttcatcctgatcacactgctggactacctggccgctctgatcgaggaaaaccccaagagcaagaaggccaacatcggcgacctgctggtgtccgtgtctgaaacagcactgctgctgggcaccagcatcgaccaggtgtacagactgtaccaggacggcatcttccagaccgccttccggctgaagctgaaccagagaatcaaccccaacaagggcgtgttcttcctgcggcaagtgatcgagtacaaggccagcttcggcaacgacaagaaccgtatgtacgtgtccgcctggtga

SEQ ID NO: 451 - DNA, 633 bp, Artificial Sequence
  Synthetic
atgcggaccatgttcgaccagaccaagaaaagcagccacgtgcacaacatctgcaagttcatgagcctgaagaacgacgccgtcgtgcggacactgagcgtgctggaattcgacttctgcttccacctcgagtacaaccccgacgtgaagcggtacatctctcagccccacggcttctactactacttcaacggccggaagtgccggtacacccctgactttctggccgacgaccacaaggatcagagcaccctgatcgagatcaagcacagcagccagatcctgaagcctgacttccggcagagattcgccgagaagcagagagtggccctggaagaacagggcaagagactggtgctggtcaccgagaaacagatcagaatcgaccccatcttcagcaacctgaagctgctgcacagatacagcggcctgcacaccgtgaccaaggtgcagaaatccgtgctgggcttcatccagagaaagcagaaggtgcagctgagagaggtgtccgagtacctgggactgagcgagcacgagacactgatcagcaccctgtgctggctgtctagcggaagagtgcggaccgacatcagaagcagcgacttcggcctgaacagctacgtgtggtgctga

SEQ ID NO: 452 - DNA, 1881 bp, Artificial Sequence
  Synthetic
atggccagcgacttcgacgatgtgttcggcttcatcgacgagatggaagccagcgctcaagaggccgagctggccacaaaactgcccagggatctgttcgaagaggacaccagctacctgcctaccatcgacacattccccgagaaaacccagaaagaggtgttccggcggctgaaagtgatccagttcaccgagaagagactgaaaggcggctggacagagaagaacctggtgcctatcctgaaccaggtggaacaagagctggccctgtctcctccatcttggagagtgctggccgagtggaagaaggtgtactttgagagcggccggtctatccacagcctggtgccagctcatgcccagaagggcaacagaaaccagcacaccgatagccagctgctgatcgacgaggccatcaacaagaagtacctgaccaaagaacggctgagcgtggccgaggcctaccggtactataagagcagagtgatcaagaccaatcaagagatcgtcgagggcaagatcaagctgatcaaagagcggagcttctacaacagagtgaagggcctgcctccttacgacgtggccgtggccagatacggcaagagatacgccgaccgcgagttcagaccagtgggacagcagatcgaggccaccaagcctatggaatacgtggaaatcgatcacacccctgtgcctgtgatcctgatcgatgacgagctggacatccctctgggcagaccctacctgacaatgctgtacgaccggttcagcaagtgcatcgtgggcttcagcatcaacttcagagagcccagcttcgacagcgtgcggaaagccctgctgagcaccctgctggaaaagaattggatcaaggacaagttccccagcatcaccaacgactggccttgccacggcaagatcgactacctggtggtggataacggcgccgagttttggacacccagcctggaagatagcctgcggcctctggtgtccgacatccactattctcaggccgccaaaccttggagaaagaccggcatcgagaagctgttcgaccagctgaacaagggcctcgtgaatgccctgcctggcaagaccttcacaaaccccacacagctgaaggactacgaccccaagaaagaaagcgccgtgcgggtgtccgtgttcatggaactgatccacaaatgggtcatcgaccgctaccacatggacagcgacagccgggaaagacacgtgccctaccacaagtggaaagaatccaagtggctgcccaacttctaccagggcaaagccgccgctgacctgagaattgaactgggcctgctgcggcacagaaccatcggaacagccggaatcagactgcacaacctgtgctaccagagcgaggaactgattgagtaccggaagtacaactccgtgaacagccagggcaagctgtacgtgcggaccaagaccgatcctagcgacatcagcgctatctacgtgttcctggaaagcgagaagcggtacatcaaggtgcccgccgtggacaatagcggctacacaaatggcctgagcctgttcgagcacgagcggattcagagagtgcggagactgaacaccagaagcctggtcaacgaggaaagcctggccgacacctacctgtacatggaagccctgattgagggcgaagccgagcggatgagaaagagcagaaacaagaagctgacccagcctaagacaggcaacaccagcaagatcgccaagtaccgcgacgtgggcacagaaggccctggctctatcgtgaagaagaaggacaactccaacacagccctgaacgtggtgtctacccagctgagcctggacgacgatgatgacctggccgatatcgagggctactga

SEQ ID NO: 453 - DNA, 1074 bp, Artificial Sequence
  Synthetic
atggtcaacctgaccagcatgcagcacgagcagctgaaggcctacgacaactgcttcatcgagtaccccgagatcaccgagatctacagcatcttcgaccagctgcggttcaaccagtctctcggcggagagcctgagagctttctgctgactggcgagacaggctctggcaagacagccctgatcaacaactacctgaagagattcgaggccagcagccggtccagctggtctacacagacagtgctgagcacacggatccccagcagagtgaatgagcagtctaccctgaaccagttcctggtggacctgaacagcaagagcggcggcagaagcaccagaaggcggaacgaaattgccctgggcgagtctgttgtgcggcacctgaaacggaagtccgtggaactgatcatcgtgaacgagatccaagagctggtggaattcagcaacgccgacgagagacagacaatcgccaacaccttcaagtacatcagcgaggaatccggcgtgtccttcgtgctcgtgggaatgccttacgccgacgtgatcgccaatgagagccagtggaacagcagactgagctggcggagagagatcaactacttcaccctgttcaaggacgacagaggccccaaggacactggccccaagtacagaattgacgccgtgcagaaaaagcacttcgccatgtttgtggccggcctggccagcagaatgggctacgaaaacaagcccctgctgaccaacaacgagattctgtaccctctgttcagcatgtgcagaggcgagtgcagacggctgaagcacttcctgaaggacgccatgctgatgagcttcaaagaggacaagaacaccatggacaaagaggtgctgtccagcacattcgccctgaagttccccagcctggacaaccctttcgagtgctccctggacaagctggaactggaccagatcgatatcggcagcgcctacaacaccagagccatcaccgccgaggataagattctggcccctcggtttaccgacgccattcctctgagcatcctgctgagcaagtccggcctgaaagtgtga

SEQ ID NO: 454 - DNA, 1212 bp, Artificial Sequence
  Synthetic
atgaacaccgacatccagctgtaccccgacgagagcctggaaagcttcctgctgagactgagccaagagcagggctacgagcggttctctcacttcgccgaggacatttggttcgacaccatggaccagcacgaggccattgccggcgcttttccactggaactgaaccgcgtgaacatctatcacgcccagaccaccagccagatgagagtgcgggtgctgatccacctggaaaaccagctgaagctgaacaacttcggcgtgctgaggctggccctgtctcactctaaagcccagctgagccctcagtacaaggccgtgcacagattcggcgtggactacccttacgccttcctgcggaagcggtttacccctatctgccctctgtgcatcaacgaggccccttacatccaccagcagtggcagttcattagccaccaggcctgtgaacaccacggctgcaagctgacacaccactgtcctgagtgcagcagcagactggaataccagagcaccgagagcatcggccagtgcgagtgtggctatgagctgagaaacagccccgtggacgatgcccctgaagccgaaacactggtggccagatggctgagcggcaacgattctaagcctctgggactgctgaaggccgagatgacaatccccgagagatacggctttctgctttggtacgtgaaccgctacggcgacatcgacgacctgagcttcgagagcttcatcgagtactgctgcgcctggcctacagctctgtggcaggatctggatgccctgaaagaaaaggccgaactcgtgcggatcaaggactggaagaaggtgttctttaacgaggccttcggcgccctgctgaaagactgtagacagctgcctagccgccagctgtcccacaatatcgtgctggctcaggtgctggcctacttcaccaagctgatggccacagtgcctagcagcgccaagggcaacattggagatgtgctgctgagcccactggaagccagcacactgctgagctgcaccaccgatgaggtgtaccggctgtacgagtttggcgagatcaaggccgccatcagaccccggatgcacacaaagattgccagccacgagagcgccttcacactgagaagcgtgatcgagacaaagctgacccggatgagcagcgagtccgatggcctgtctgtgtacctgcctgagtggtga

SEQ ID NO: 455 - protein, 576 aa, Artificial Sequence
  Synthetic
MYMRNETPITPDNLETESVTAKDTQIIVSELSDEAKLKMEIIQSLLEAGDRTTYAQRLKEAAVKLGKSVRTVRRLIDKWEQEGLVGLTQTDRVDKGKHRVDENWQEFILKTYKEGNKGGKRMTRQQVAIRVKVRADQLGVKPPSHMTVYRILEPVIEKQEKAKSIRTPGWRGSRLSLKTRDGLDLSVEYSNHIWQCDHTRADILLVDQHGELLARPWLTTVIDTYSRCIIGINLGFDAPSSQVVALALRHAILPKKYGAEYGLHEEWGTYGKPEHFFTDGGKDFRSNHLQQIGVQLGFACHLRDCPSEGGIVERPFGTLNTDLFSTLPGYTGSNVQERPEEAEKEACLTLRELERLLVRYLVDKYNQSIDARLGDQTRYQRWEAGLIVAPNLISEEDLRICLMKQTRRSIYRGGYLQFENLTYRGENLAGYAGESVVLRFDPKDITTILVYRQTGFQEEFLARAYAQDLETEELSLDEAKAMSRRIRQAGKEISNRSILAEVRDRETFVKQKKTKKERQKEEQVVVEKASSERSRTAKKPVIVEPEEIEVASVESSSDTDMPEVFDYEQMREDYGW

SEQ ID NO: 456 - protein, 278 aa, Artificial Sequence
  Synthetic
MISQQAQGVAQELGDILPNDEKLQAEIHRLNRKSFIPLEQVKMLHDWLDGKRQSRQSGRVLGESRTGKTMGCDAYRLRHKPKQEPGKPPTVPVAYIQIPQECSAKELFAAIIEHLKYQMTKGTVAEIRDRTLRVLKGCGVEMLIIDEADRFKPKTFAEVRDIFDKLEIAVILVGTDRLDAVIKRDEQVYNRFRACHRFGKFSGEDFKRTVEIWERQVLKLPVASNLSGKAMLKTLGEATGGYIGLLDMILRESAIRALKKGLSKIDLETLKEVTAEYK

SEQ ID NO: 457 - protein, 173 aa, Artificial Sequence
  Synthetic
MEVGEINPWLFQVEPFEGESISHFLGRFRRANDLTTTGLGKAAGVGGAISRWEKFRFNPPPSRQQLEALAKVVGVDADRLARMLPPAGVGMNLEPIRLCAACYVESPCHRIEWQFKVTQGCEDHHLSLLSECPNCGARFKVPALWVDGWCLRCFTLFGEMVKSQNFIESHNKI

SEQ ID NO: 458 - protein, 288 aa, Artificial Sequence
  Synthetic
MDPIRSRTPSPARELLSGPQPDGVQPTADRGVSPPAGGPLDGLPARRTMSRTRLPSPPAPSPAFSADSFSDLLRQFDPSLFNTSLFDSLPPFGAHHTEAATGEWDEVQSGLRAADAPPPTMRVAVTAARPPRAKPAPRRRAAQPSDASPAAQVDLRTLGYSQQQQEKIKPKVRSTVAQHHEALVGHGFTHAHIVALSQHPAALGTVAVKYQDMIAALPEATHEAIVGVGKQWSGARALEALLTVAGELRGPPLQLDTGQLLKIAKRGGVTAVEAVHAWRNALTGAPLN

SEQ ID NO: 459 - protein, 183 aa, Artificial Sequence
  Synthetic
RPALESIVAQLSRPDPALAALTNDHLVALACLGGRPALDAVKKGLPHAPALIKRTNRRIPERTSHRVADHAQVVRVLGFFQCHSHPAQAFDDAMTQFGMSRHGLLQLFRRVGVTELEARSGTLPPASQRWDRILQASGMKRAKPSPTSTQTPDQASLHAFADSLERDLDAPSPMHEGDQTRAS

SEQ ID NO: 460 - protein, 4 aa, Artificial Sequence
  Synthetic
GGGS

SEQ ID NO: 461 - protein, 5 aa, Artificial Sequence
  Synthetic
GGGGS

SEQ ID NO: 462 - protein, 9 aa, Artificial Sequence
  Synthetic
GGSGGSGGS

SEQ ID NO: 463 - protein, 15 aa, Artificial Sequence
  Synthetic
GGGGSGGGGSGGGGS

SEQ ID NO: 464 - protein, 20 aa, Artificial Sequence
  Synthetic
GGGGSGGGGSGGGGSGGGGS

SEQ ID NO: 465 - protein, 25 aa, Artificial Sequence
  Synthetic
GGGGSGGGGSGGGGSGGGGSGGGGS

SEQ ID NO: 466 - protein, 30 aa, Artificial Sequence
  Synthetic
GGGGSGGGGSGGGGSGGGGSGGGGSGGGGS

SEQ ID NO: 467 - protein, 35 aa, Artificial Sequence
  Synthetic
GGGGSGGGGSGGGGSGGGGSGGGGSGGGGSGGGGS

SEQ ID NO: 468 - protein, 40 aa, Artificial Sequence
  Synthetic
GGGGSGGGGSGGGGSGGGGSGGGGSGGGGSGGGGSGGGGS

SEQ ID NO: 469 - protein, 45 aa, Artificial Sequence
  Synthetic
GGGGSGGGGSGGGGSGGGGSGGGGSGGGGSGGGGSGGGGSGGGGS

SEQ ID NO: 470 - protein, 50 aa, Artificial Sequence
  Synthetic
GGGGSGGGGSGGGGSGGGGSGGGGSGGGGSGGGGSGGGGSGGGGSGGGGS

SEQ ID NO: 471 - protein, 55 aa, Artificial Sequence
  Synthetic
GGGGSGGGGSGGGGSGGGGSGGGGSGGGGSGGGGSGGGGSGGGGSGGGGSGGGGS

SEQ ID NO: 472 - protein, 60 aa, Artificial Sequence
  Synthetic
GGGGSGGGGSGGGGSGGGGSGGGGSGGGGSGGGGSGGGGSGGGGSGGGGSGGGGSGGGGS

SEQ ID NO: 473 - protein, 65 aa, Artificial Sequence
  Synthetic
GGGGSGGGGSGGGGSGGGGSGGGGSGGGGSGGGGSGGGGSGGGGSGGGGSGGGGSGGGGSGGGGS

SEQ ID NO: 474 - protein, 70 aa, Artificial Sequence
  Synthetic
GGGGSGGGGSGGGGSGGGGSGGGGSGGGGSGGGGSGGGGSGGGGSGGGGSGGGGSGGGGSGGGGSGGGGS

SEQ ID NO: 475 - protein, 75 aa, Artificial Sequence
  Synthetic
GGGGSGGGGSGGGGSGGGGSGGGGSGGGGSGGGGSGGGGSGGGGSGGGGSGGGGSGGGGSGGGGSGGGGSGGGGS

SEQ ID NO: 476 - protein, 10 aa, Artificial Sequence
  Synthetic
GGGGSGGGGS

SEQ ID NO: 477 - protein, 32 aa, Artificial Sequence
  Synthetic
LEPGEKPYKCPECGKSFSQSGALTRHQRTHTR

SEQ ID NO: 478 - protein, 20 aa, Artificial Sequence
  Synthetic
PKKKRKVEASSPKKRKVEAS

SEQ ID NO: 479 - DNA, 27 bp, Artificial Sequence
  Synthetic
ggtggtagtggagggagcggcggttca

SEQ ID NO: 480 - DNA, 72 bp, Artificial Sequence
  Synthetic
ggtggaggaggctctggtggaggcggtagcggaggcggagggtcgggtggtagtggagggagcggcggttca

SEQ ID NO: 481 - DNA, 48 bp, Artificial Sequence
  Synthetic
tcgggatctgagacgcctgggacctcggaatcggctacgcccgaaagt

SEQ ID NO: 482 - DNA, 192 bp, Artificial Sequence
  Synthetic
gtggataacaaatttaacaaagaaatgtgggcggcgtgggaagaaattcgtaacctgccgaacctgaacggctggcagatgaccgcgtttattgcgagcctggtggatgatccgagccagagcgcgaacctgctggcggaagcgaaaaaactgaacgatgcgcaggcgccgaaaaccggcggtggttctggt

SEQ ID NO: 483 - DNA, 108 bp, Artificial Sequence
  Synthetic
ggtggttctgccggtggctccggttctggctccagcggtggcagctctggtgcgtccggcacgggtactgcgggtggcactggcagcggttccggtactggctctggc

SEQ ID NO: 484 - protein, 7 aa, Artificial Sequence
  Synthetic
PKKKRKV

SEQ ID NO: 485 - protein, 15 aa, Artificial Sequence
  Synthetic
KRPAATKKAGQAKKK

SEQ ID NO: 486 - protein, 9 aa, Artificial Sequence
  Synthetic
PAAKRVKLD

SEQ ID NO: 487 - protein, 10 aa, Artificial Sequence
  Synthetic
RQRRNELKRS

SEQ ID NO: 488 - protein, 38 aa, Artificial Sequence
  Synthetic
NQSSNFGPMKGGNFGGRSSGPYGGGGQYFAKPRNQGGY

SEQ ID NO: 489 - protein, 42 aa, Artificial Sequence
  Synthetic
RMRIZFKNKGKDTAELRRRRVEVSVELRKAKKDEQILKRRNV

SEQ ID NO: 490 - protein, 8 aa, Artificial Sequence
  Synthetic
VSRKRPRP

SEQ ID NO: 491 - protein, 8 aa, Artificial Sequence
  Synthetic
PPKKARED

SEQ ID NO: 492 - protein, 8 aa, Homo sapiens
PQPKKKPL

SEQ ID NO: 493 - protein, 12 aa, Mus sp.
SALIKKKKKMAP

SEQ ID NO: 494 - protein, 5 aa, Influenza virus
DRLRR

SEQ ID NO: 495 - protein, 7 aa, Influenza virus
PKQKKRK

SEQ ID NO: 496 - protein, 10 aa, Hepatitis virus
RKLKKKIKKL

SEQ ID NO: 497 - protein, 10 aa, Mus sp.
REKKKFLKRR

SEQ ID NO: 498 - protein, 20 aa, Homo sapiens
KRKGDEVDGVDEVAKKKSKK

SEQ ID NO: 499 - protein, 17 aa, Homo sapiens
RKCLQAGMNLEARKTKK

SEQ ID NO: 500 - protein, 107 aa, Artificial Sequence
  Synthetic
IEVMYPPPYLDNEKSNGTIIHVKGKHLCPSPLFPGPSKPFWVLVVVGGVLACYSLLVTVAFIIFWVRSKRSRLLHSDYMNMTPRRPGPTRKHYQPYAPPRDFAAYRS

SEQ ID NO: 501 - protein, 9 aa, Artificial Sequence
  Synthetic
IEVMYPPPY

SEQ ID NO: 502 - DNA, 20 bp, Artificial Sequence
  Synthetic
gccaaattggacgaccctcg

SEQ ID NO: 503 - DNA, 20 bp, Artificial Sequence
  Synthetic
cgaggagacccccgtttcgg

SEQ ID NO: 504 - DNA, 20 bp, Artificial Sequence
  Synthetic
cccgccgccgccgtggctcg

SEQ ID NO: 505 - DNA, 20 bp, Artificial Sequence
  Synthetic
tgagctctacgagatccaca

What is claimed is:

1. An engineered composition comprising: a programmable DNA-binding protein and two or more Tn7-like transposition proteins, wherein at least one of the Tn7-like transposition proteins is connected to the DNA-binding protein or otherwise capable of forming a complex with the DNA-binding protein.

2. The composition of claim 1, wherein at least one of the Tn7-like transposition proteins is connected to an N-terminus or C-terminus of the DNA binding protein.

3. The composition of claim 1, wherein the two or more Tn7-like transposition proteins are derived from CRISPR-associated Tn7-like transposition proteins.

4. The composition of any one of the preceding claims, wherein the CRISPR-associated Tn7-like transpositions comprises at least a Cas-12k associated transposase.

5. The composition of any one of the preceding claims, wherein the two or more Tn7-like transposition proteins consist of TnsB, TnsC, and TniQ, wherein TniQ is connected to the DNA-binding polypeptide.

6. The composition of any one of the preceding claims, wherein the two or more Tn7-like transposition proteins consist of TnsC and TnsB, wherein TnsC is connected to the DNA-binding polypeptide.

7. The composition of claim 5 or 6, wherein the TnsB, TnsC, and TniQ are proteins of, or proteins encoded by polynucleotides in Tables 1-6.

8. The composition of any one of the preceding claims, wherein the programmable DNA-binding protein is a catalytically inactive transcription activator-like effector, Zinc Finger protein, meganuclease, IscB protein, a Cas protein, or a complex of Cas proteins.

9. The composition of any one of the proceeding claims, wherein the DNA-binding protein is a Cas protein, other than a Cas12k protein, and the composition further comprises a guide molecule capable of forming a complex with the Cas protein and directing site specific binding of the complex to a target sequence in a target polypeptide.

10. The composition of claim 9, wherein the Cas protein is a Type II or Type V Cas protein, or a complex of a Cas proteins complex.

11. The composition of claim 10, wherein the Cas protein is a catalytically inactive Cas9 (dCas9) or a nickase.

12. The composition of claim 11, wherein the dCas9 is fused to one, two or three or more TniQ, optionally at the N-terminus of the dCas9.

13. The composition of claim 10, wherein the Cas protein is a catalytically inactive Cas12 (dCas12).

14. The composition of claim 13, wherein the dCas12 is a dCas12b or dCas12a, optionally Bacillus hisashii Cas12b.

15. The composition of claim 13, wherein the Tn7-like transposition proteins consist of TnsC or TniQ.

16. The composition of any one of the proceeding claims, further comprising a donor polynucleotide comprising a donor sequence for insertion into a target polynucleotide.

17. The composition of any one of the proceeding claims, wherein the DNA-binding protein is a Cas protein, and the donor sequence is to be inserted at a position 3′ or 5′ of a PAM sequence of the Cas protein in the target polynucleotide.

18. The composition of claim 16, wherein the donor sequence is flanked by a right end sequence element and a left end sequence element.

19. The composition of claim 16, wherein the donor sequence:
a. introduces one or more mutations to the target polynucleotide,
b. introduces or corrects a premature stop codon in the target polynucleotide,
c. disrupts a splicing site,
d. restores or introduces a splicing site,
e. inserts a gene or gene fragment at one or both alleles of a target polynucleotide, or
f. a combination thereof.

20. The composition of claim 19, wherein the one or more mutations introduced by the donor sequence comprises substitutions, deletions, insertions, or a combination thereof.

21. The composition of claim 19, wherein the one or more mutations causes a shift in an open reading frame on the target polynucleotide.

22. The composition of claim 19, wherein the donor sequence is up to 30 kb in length.

23. The composition of claim 19, wherein the donor polynucleotide is linear.

24. An engineered composition comprising one or more polynucleotides encoding components of the composition of any one of claims 1-23.

25. The composition of claim 24, wherein one or more polynucleotides is operably linked to one or more regulatory sequences.

26. A vector system comprising one or more vectors encoding one or more polynucleotides encoding components of the composition of any one of claims 1-23.

27. The vector system of claim 22, comprising a first vector encoding the DNA-binding protein connected to the Tn7-like transposition protein, a second vector encoding the remaining Tn7-like transposition protein(s), and a third vector encoding the donor polynucleotide.

28. A cell or progeny thereof comprising the vector of claim 27.

29. A cell comprising the composition of any one of claims 1-23, or a progeny thereof comprising one or more insertions made by the composition.

30. The cell of claim 29, wherein the cell is a prokaryotic cell.

31. The cell of claim 29, wherein the cell is a eukaryotic cell.

32. The cell of claim 29, wherein the cell is a mammalian cell, a cell of a non-human primate, or a human cell.

33. The cell of claim 29, wherein the cell is a plant cell.

34. An organism or a population thereof comprising the cell of any one of claims 29-33.

35. A method of inserting a donor sequence into a target polynucleotide in a cell, which comprises introducing into the cell the composition of any one of claims 1-19,
wherein the DNA-binding protein directs the one or more Tn7-like transposition proteins to the target sequence and the one or more Tn7-like transposition proteins inserts the donor sequence into the target polynucleotide.

36. The method of claim 35, wherein the DNA-binding protein is a Cas protein, and the donor sequence is inserted at a position 3′ or 5′ of a PAM sequence of the Cas protein in the target polynucleotide.

37. The method of claim 35, wherein the donor polynucleotide:
a. introduces one or more mutations to the target polynucleotide,
b. corrects or introduces a premature stop codon in the target polynucleotide,
c. disrupts a splicing site,
d. restores or introduces a splicing site,
e. inserts a gene or gene fragment at one or both alleles of a target polynucleotide, or
f. a combination thereof.

38. The method of claim 37, wherein the one or more mutations introduced by the donor sequence comprises substitutions, deletions, insertions, or a combination thereof.

39. The method of claim 37, wherein the one or more mutations causes a shift in an open reading frame on the target polynucleotide.

40. The method of claim 37, wherein the donor sequence is at least 30 kb in length.

41. The method of claim 35, wherein the cell is a prokaryotic cell.

42. The method of claim 35, wherein the cell is a eukaryotic cell.

43. The method of claim 35, wherein the cell is a mammalian cell, a cell of a non-human primate, or a human cell.

44. The method of claim 35, wherein the cell is a plant cell.
